United States Patent Application Publication US 2026/0286339 A1, published September 24, 2026 (application 19/423,675).

The application's sequence listing, which the Patent Office published only in electronic form, follows.

SEQUENCE LISTING (1364 sequences)

SEQ ID NO: 1 - DNA, 80 bp, synthetic construct
  misc_feature 1..80: note = Synthetic: DF0000247.4:START2561:INDEX551:OBS1
  source 1..80: mol_type = other DNA
aacactccaatcaaaaggcagagattgtcagactggataaaaaagcaagatccaactatatgctgtctacaagagacaca

SEQ ID NO: 2 - DNA, 80 bp, synthetic construct
  misc_feature 1..80: note = Synthetic: DF0000049.4:START161:INDEX749:OBS1
  source 1..80: mol_type = other DNA
aatcccagctactcgggaggctgaggcaggagaatcgcttgaacccgggaggcggaggttgcagtgagccgagatcgcgc

SEQ ID NO: 3 - DNA, 80 bp, synthetic construct
  misc_feature 1..80: note = Synthetic: DF0001067.4:START1281:INDEX667:OBS1
  source 1..80: mol_type = other DNA
acgtgtttatctgctgaccttctctccactattatcctatgaccctgccacatccccctctccgagaaacacccaagaat

SEQ ID NO: 4 - DNA, 80 bp, synthetic construct
  misc_feature 1..80: note = Synthetic: DF0001316.2:START232:INDEX903:OBS1
  source 1..80: mol_type = other DNA
agattgcgccactgcactcccacctgggccacagagcgagactccgtctcaaaaaaaaaaaaaaaaaaaaaaaaaaaaaa

SEQ ID NO: 5 - DNA, 80 bp, synthetic construct
  misc_feature 1..80: note = Synthetic: DF0001072.4:START1201:INDEX189:OBS1
  source 1..80: mol_type = other DNA
aatcagggacacaaacactgcggaaggccgcagggtcctctgcctaggaaaaccagagacctttgttcacttgtttatct

SEQ ID NO: 6 - DNA, 80 bp, synthetic construct
  misc_feature 1..80: note = Synthetic: DF0001072.4:START1121:INDEX506:OBS1
  source 1..80: mol_type = other DNA
ggtgcaagatgtgctttgttaaacagatgcttgaaggcagcatgctcgttaagagtcatcaccaatccctaatctcaagt

SEQ ID NO: 7 - DNA, 80 bp, synthetic construct
  misc_feature 1..80: note = Synthetic: DF0001071.4:START1041:INDEX727:OBS1
  source 1..80: mol_type = other DNA
ggatcctgttgatctgtgaccttatccccaaccctgtgctctctgaaacatgtgctgtgtccactcagggttaaatggat

SEQ ID NO: 8 - DNA, 80 bp, synthetic construct
  misc_feature 1..80: note = Synthetic: DF0001068.4:START401:INDEX843:OBS1
  source 1..80: mol_type = other DNA
gccttggcctcccaaagtgccgagattgcagcctctgcccggccgccaccccgtctgggaagtgaggagcgtctctgcct

SEQ ID NO: 9 - DNA, 80 bp, synthetic construct
  misc_feature 1..80: note = Synthetic: DF0001068.4:START721:INDEX219:OBS1
  source 1..80: mol_type = other DNA
cagccgccccgtccgggaggaggtggggggaacagccccccgcccggccagccgccccgtccgggaggtggggggcgcct

SEQ ID NO: 10 - DNA, 80 bp, synthetic construct
  misc_feature 1..80: note = Synthetic: DF0000250.4:START3201:INDEX622:OBS1
  source 1..80: mol_type = other DNA
cccaattaaaaaatgggcaaaggatttgaatagacatttctccaaagaagatatacaaatggccaataagcacatgaaaa

SEQ ID NO: 11 - DNA, 80 bp, synthetic construct
  misc_feature 1..80: note = Synthetic: DF0001068.4:START641:INDEX462:OBS1
  source 1..80: mol_type = other DNA
ccccgtctgggaagtgaggagcgcctctgcccggccagccgccccgtctgggaggtgaggaggtcagccccccgcccggc

SEQ ID NO: 12 - DNA, 80 bp, synthetic construct
  misc_feature 1..80: note = Synthetic: DF0001071.4:START481:INDEX480:OBS1
  source 1..80: mol_type = other DNA
cgcccatcgtccgggaagtgaggagcccctctgcccggccgccccgtccgggaggtgaggagcgcctctgcccggccgcc

SEQ ID NO: 13 - DNA, 80 bp, synthetic construct
  misc_feature 1..80: note = Synthetic: DF0000249.4:START1601:INDEX838:OBS1
  source 1..80: mol_type = other DNA
aactgtcaaccaagaatactatatccggcaaaactgtccttcaaaaatgagggagaaattaagacattcccagataaaca

SEQ ID NO: 14 - DNA, 80 bp, synthetic construct
  misc_feature 1..80: note = Synthetic: DF0001070.4:START241:INDEX912:OBS2
  source 1..80: mol_type = other DNA
ggctggtctccagctcctaaccgcgagtgatccgccagcctcggcctcccgaggtgccgggattgcagacggagtctcgt

SEQ ID NO: 15 - DNA, 80 bp, synthetic construct
  misc_feature 1..80: note = Synthetic: DF0000001.4:START81:INDEX371:OBS1
  source 1..80: mol_type = other DNA
ctgtgtgaccttgggcaagttacttaacctctctgtgcctcagtttcctcatctgtaaaatggggataataatagtacct

SEQ ID NO: 16 - DNA, 80 bp, synthetic construct
  misc_feature 1..80: note = Synthetic: DF0000246.4:START1041:INDEX746:OBS1
  source 1..80: mol_type = other DNA
aaactgactctgagtgggcccagatgttggaattagcagacaaagacttcaaagcagctattataaatatgttcaaagaa

SEQ ID NO: 17 - DNA, 80 bp, synthetic construct
  misc_feature 1..80: note = Synthetic: DF0000249.4:START1281:INDEX531:OBS1
  source 1..80: mol_type = other DNA
aagagagagagaaaggggcagagagaatatttgaagaaataatggccgaaaacttcccaaatttgaagaaagacatgaat

SEQ ID NO: 18 - DNA, 80 bp, synthetic construct
  misc_feature 1..80: note = Synthetic: DF0001068.4:START961:INDEX663:OBS1
  source 1..80: mol_type = other DNA
attgttactgtgtctgtgtagaaagaagtagacataggagactccattttgttctgtactaagaaaaattcttctgcctt

SEQ ID NO: 19 - DNA, 80 bp, synthetic construct
  misc_feature 1..80: note = Synthetic: DF0000248.4:START1921:INDEX580:OBS1
  source 1..80: mol_type = other DNA
aatttgatgaaaaacattaatctacacatccaagaagctcaacgaactccaagtaggataaacgcaaagagatccacacc

SEQ ID NO: 20 - DNA, 80 bp, synthetic construct
  misc_feature 1..80: note = Synthetic: DF0000280.4:START1441:INDEX10:OBS1
  source 1..80: mol_type = other DNA
aggaaccagggctccttggagaaatggctgattccaggtctggggcaggaaatgtacaagatgagcctggaacatcttgt

SEQ ID NO: 21 - DNA, 80 bp, synthetic construct
  misc_feature 1..80: note = Synthetic: DF0000247.4:START1361:INDEX945:OBS1
  source 1..80: mol_type = other DNA
acagcagatttgagatggcagaagaaagaatcagtgaacttgaagatagatcaatagaaattatccaatctgaagaacag

SEQ ID NO: 22 - DNA, 80 bp, synthetic construct
  misc_feature 1..80: note = Synthetic: DF0000246.4:START1601:INDEX708:OBS1
  source 1..80: mol_type = other DNA
agacacatcatagtcaaactgctgaaagccaaagacaaagagaaaatcttgaaagcagcaagagaaaaacgacacattac

SEQ ID NO: 23 - DNA, 80 bp, synthetic construct
  misc_feature 1..80: note = Synthetic: DF0001072.4:START961:INDEX524:OBS1
  source 1..80: mol_type = other DNA
tgtctgtgtagaaagaagtagacatgggagacttttcattttgttctgcactaagaaaaattcctctgccttgggatcct

SEQ ID NO: 24 - DNA, 80 bp, synthetic construct
  misc_feature 1..80: note = Synthetic: DF0001068.4:START881:INDEX119:OBS1
  source 1..80: mol_type = other DNA
attgagaacgggccatgatgacgatggcggttttgtcgaatagaaaagggggaaatgtggggaaaagaaagagagatcag

SEQ ID NO: 25 - DNA, 80 bp, synthetic construct
  misc_feature 1..80: note = Synthetic: DF0000246.4:START961:INDEX570:OBS1
  source 1..80: mol_type = other DNA
cagttttcaacaaaaaattacaagacatgcaaagaaacaggaaaatgtgacccataatcaggaaaaaaagcagtcaatag

SEQ ID NO: 26 - DNA, 80 bp, synthetic construct
  misc_feature 1..80: note = Synthetic: DF0001072.4:START561:INDEX69:OBS1
  source 1..80: mol_type = other DNA
ccgggaggtgaggagcgtctccgcccggccgcccaccgtccgggaagtgaggagcgcctccgcccggccgccccgtccgg

SEQ ID NO: 27 - DNA, 80 bp, synthetic construct
  misc_feature 1..80: note = Synthetic: DF0000281.4:START481:INDEX734:OBS2
  source 1..80: mol_type = other DNA
aaacaacccaaatgtccatcaataggggactggttgaataaactatggtacatccacacaatggagtactatgcagctgt

SEQ ID NO: 28 - DNA, 80 bp, synthetic construct
  misc_feature 1..80: note = Synthetic: DF0000279.4:START2241:INDEX495:OBS1
  source 1..80: mol_type = other DNA
aaacccaaattgagggacattctacaaaataactgaccagtactcttcaaaagtgtcaaggtcatgaaagacaaggaaag

SEQ ID NO: 29 - DNA, 80 bp, synthetic construct
  misc_feature 1..80: note = Synthetic: DF0000248.4:START2241:INDEX853:OBS1
  source 1..80: mol_type = other DNA
aaagacattcccagataaacaaaaactgagagaatttgttgctagcagacccgccttacaagaaatactaaaggaagttc

SEQ ID NO: 30 - DNA, 80 bp, synthetic construct
  misc_feature 1..80: note = Synthetic: DF0000279.4:START161:INDEX935:OBS1
  source 1..80: mol_type = other DNA
aaatgcaaattaaaactacactgagataccatttctcacctatcagattggcaaaaattcaaaagtttgacaacacactc

SEQ ID NO: 31 - DNA, 80 bp, synthetic construct
  misc_feature 1..80: note = Synthetic: DF0000280.4:START1761:INDEX948:OBS1
  source 1..80: mol_type = other DNA
aactggtaaataaagggaaagaatcaagcatttatcctgcctttcctatacgaactgtacctcagggtaaccaaatagtt

SEQ ID NO: 32 - DNA, 80 bp, synthetic construct
  misc_feature 1..80: note = Synthetic: DF0000247.4:START1201:INDEX218:OBS1
  source 1..80: mol_type = other DNA
aaggaaaccatgtttaaagaattaaaggaaagtatgacgacaatgactcaacaaatagagaatatcaataaagagataga

SEQ ID NO: 33 - DNA, 80 bp, synthetic construct
  misc_feature 1..80: note = Synthetic: DF0000247.4:START2161:INDEX107:OBS1
  source 1..80: mol_type = other DNA
aataattataacactgtattgttgggtttataacatatatagatgtaatatatatgacaataatagcacaaaggaggggg

SEQ ID NO: 34 - DNA, 80 bp, synthetic construct
  misc_feature 1..80: note = Synthetic: DF0000280.4:START2561:INDEX829:OBS1
  source 1..80: mol_type = other DNA
gtatagatgaaacaagattggccatgagttgataattgttgaagctgggtgatgggtacatgggggttcattatactatt

SEQ ID NO: 35 - DNA, 80 bp, synthetic construct
  misc_feature 1..80: note = Synthetic: DF0000014.4:START93:INDEX488:OBS1
  source 1..80: mol_type = other DNA
aatctgcgaagggatatttgggagcacattgaggcctatggtgaaaaagaaaatatcttcagataaaaactagaaagaag

SEQ ID NO: 36 - DNA, 80 bp, synthetic construct
  misc_feature 1..80: note = Synthetic: DF0001071.4:START801:INDEX553:OBS1
  source 1..80: mol_type = other DNA
cccggccgcccctactgggaagtgaggagcccctctgcccggccaccgccccgtccgggaggtgtgcccagcggctcatt

SEQ ID NO: 37 - DNA, 80 bp, synthetic construct
  misc_feature 1..80: note = Synthetic: DF0000247.4:START1281:INDEX184:OBS1
  source 1..80: mol_type = other DNA
aattataaaaaagaaccaaatggaaattctggagttgaaaagtacaataactgaaatgaaaaattcactagaggggctca

SEQ ID NO: 38 - DNA, 80 bp, synthetic construct
  misc_feature 1..80: note = Synthetic: DF0000246.4:START1:INDEX149:OBS1
  source 1..80: mol_type = other DNA
ggcgggacttccggctatggcggagtgaagaggtcggcaaatcctctccccaaaaaacaaatataaaactggacaaaatt

SEQ ID NO: 39 - DNA, 80 bp, synthetic construct
  misc_feature 1..80: note = Synthetic: DF0000246.4:START2161:INDEX315:OBS1
  source 1..80: mol_type = other DNA
ggggaggaaatggagctatattgaagcaaagttactatattttaccggaattaagtcagtattaacctgaagtagattgt

SEQ ID NO: 40 - DNA, 80 bp, synthetic construct
  misc_feature 1..80: note = Synthetic: DF0000248.4:START1761:INDEX806:OBS1
  source 1..80: mol_type = other DNA
acagagagaaaaaagaatgaagaaaaatgaacagagcctcagagaaatgtgggacaccattaagcgcaccaacatacgcg

SEQ ID NO: 41 - DNA, 80 bp, synthetic construct
  misc_feature 1..80: note = Synthetic: DF0001320.2:START81:INDEX889:OBS5
  source 1..80: mol_type = other DNA
gaccatcctggctaacacggtgaaaccccgtctctactaaaaatacaaaaaattagccgggcgtggtggcgggcgcctgt

SEQ ID NO: 42 - DNA, 80 bp, synthetic construct
  misc_feature 1..80: note = Synthetic: DF0000246.4:START1921:INDEX598:OBS1
  source 1..80: mol_type = other DNA
tcaggctgaaaggaaatgacaccagacggaaactcgaatccacaggaagaaatgaagagcaccggaaatggtaaatatgt

SEQ ID NO: 43 - DNA, 80 bp, synthetic construct
  misc_feature 1..80: note = Synthetic: DF0000247.4:START881:INDEX432:OBS1
  source 1..80: mol_type = other DNA
acatcagcggccgcacactgcgggggagacagacttcacagaattagtccaggcaagtcactaaacaaacaaacaaaaac

SEQ ID NO: 44 - DNA, 80 bp, synthetic construct
  misc_feature 1..80: note = Synthetic: DF0000279.4:START2081:INDEX263:OBS1
  source 1..80: mol_type = other DNA
accaccttaaccaagtgatcaaggttaacatcaccagtaataagacatatcgacatcatgtaccccctgatatgatgcac

SEQ ID NO: 45 - DNA, 80 bp, synthetic construct
  misc_feature 1..80: note = Synthetic: DF0000975.4:START161:INDEX100:OBS1
  source 1..80: mol_type = other DNA
acctacctcgcagggttgttgtgaggattaaatgagataatgcatgtaaagcgcttagcacagtgcctggcacatagtaa

SEQ ID NO: 46 - DNA, 80 bp, synthetic construct
  misc_feature 1..80: note = Synthetic: DF0001072.4:START481:INDEX363:OBS1
  source 1..80: mol_type = other DNA
cgtctgggaagtgaggagcccctctgcccggccgccccgtctgggaggtgaggagcgcctccgcccggccgccgccccgt

SEQ ID NO: 47 - DNA, 80 bp, synthetic construct
  misc_feature 1..80: note = Synthetic: DF0000280.4:START1601:INDEX353:OBS1
  source 1..80: mol_type = other DNA
actggccaaagatgggacaatttgagcatcaataaggataataactgcaatggattgaaacacatcaaatatgtttaaat

SEQ ID NO: 48 - DNA, 80 bp, synthetic construct
  misc_feature 1..80: note = Synthetic: DF0000250.4:START321:INDEX558:OBS1
  source 1..80: mol_type = other DNA
agatataacaattataaacatatatgcacctaacaacagagccccaaaatacatgaagcaaaaactgacagaattgaagg

SEQ ID NO: 49 - DNA, 80 bp, synthetic construct
  misc_feature 1..80: note = Synthetic: DF0000015.4:START81:INDEX798:OBS1
  source 1..80: mol_type = other DNA
ctctgtttgtaaagtctgcaagtggatatttggacctctttgaggccttcgttggaaacgggatttcttcatataatgct

SEQ ID NO: 50 - DNA, 80 bp, synthetic construct
  misc_feature 1..80: note = Synthetic: DF0001069.4:START801:INDEX688:OBS1
  source 1..80: mol_type = other DNA
tctgcccggccgccccttctgggaagtgaggagcccctctgcccggccgccaccccgtctgggaggtgtacccaacagct

SEQ ID NO: 51 - DNA, 80 bp, synthetic construct
  misc_feature 1..80: note = Synthetic: DF0001072.4:START321:INDEX950:OBS1
  source 1..80: mol_type = other DNA
tcaatggtgcccaggctggagtgcagtggcgtgatctcggctcgctacaacctacacctcccagccgcctgccttggcct

SEQ ID NO: 52 - DNA, 80 bp, synthetic construct
  misc_feature 1..80: note = Synthetic: DF0001068.4:START321:INDEX125:OBS1
  source 1..80: mol_type = other DNA
cactcagtgctcaatgttgcccaggctggagtgcagtggcgtgatctcggctcgctacaacctccacctcccagccgcct

SEQ ID NO: 53 - DNA, 80 bp, synthetic construct
  misc_feature 1..80: note = Synthetic: DF0000279.4:START2550:INDEX134:OBS1
  source 1..80: mol_type = other DNA
agggtatacgggaactctctgtactatttttgcaacttttctgtaagtctaaaattatttcaaaataaaaagttaaaaaa

SEQ ID NO: 54 - DNA, 80 bp, synthetic construct
  misc_feature 1..80: note = Synthetic: DF0000053.4:START161:INDEX390:OBS1
  source 1..80: mol_type = other DNA
agtcccagctacttgggaggctgaggcaggagaatggcgtgaacccgggaggcggagcttgcagtgagccgagatcccgc

SEQ ID NO: 55 - DNA, 80 bp, synthetic construct
  misc_feature 1..80: note = Synthetic: DF0000246.4:START81:INDEX325:OBS1
  source 1..80: mol_type = other DNA
gtcaaaaacaaccatttcagggctctggaaatcgaccaaaggcaaacaacaaattgagaagcgtttattcatgaaaaact

SEQ ID NO: 56 - DNA, 80 bp, synthetic construct
  misc_feature 1..80: note = Synthetic: DF0000247.4:START2401:INDEX479:OBS1
  source 1..80: mol_type = other DNA
gaattaaaatggtacactaaaaatatttatttaacacaaaagaaggcagtaaaggaggaacagaggaacaaaaaagacat

SEQ ID NO: 57 - DNA, 80 bp, synthetic construct
  misc_feature 1..80: note = Synthetic: DF0000048.4:START81:INDEX877:OBS3
  source 1..80: mol_type = other DNA
gagaccagcctggccaacatggtgaaaccccgtctctactaaaaatacaaaaattagccgggcgtggtggcgggcgcctg

SEQ ID NO: 58 - DNA, 80 bp, synthetic construct
  misc_feature 1..80: note = Synthetic: DF0000247.4:START1761:INDEX501:OBS1
  source 1..80: mol_type = other DNA
caggggaacaacaataagattaacggctgacttctcatcagaaacaatggaggccagaaggcagtgggatgacatattca

SEQ ID NO: 59 - DNA, 80 bp, synthetic construct
  misc_feature 1..80: note = Synthetic: DF0000246.4:START2401:INDEX442:OBS1
  source 1..80: mol_type = other DNA
catgagacaaatagaaaacaaatagcaaaatggcagacataaatccaaccatatcaataattacattaaatgtaaatgga

SEQ ID NO: 60 - DNA, 80 bp, synthetic construct
  misc_feature 1..80: note = Synthetic: DF0000282.4:START881:INDEX116:OBS1
  source 1..80: mol_type = other DNA
tgttggaattatcagaccgggaatttaaaacaactatgattaatatgctaagggctctaatggaaaaagtagacaacatg

SEQ ID NO: 61 - DNA, 80 bp, synthetic construct
  misc_feature 1..80: note = Synthetic: DF0000320.4:START3201:INDEX105:OBS1
  source 1..80: mol_type = other DNA
ccccatcaaaaagtgggcgaaggatatgaacagacacttctcaaaagaagacatttatgcggccaacaaacatatgaaaa

SEQ ID NO: 62 - DNA, 80 bp, synthetic construct
  misc_feature 1..80: note = Synthetic: DF0000279.4:START241:INDEX830:OBS1
  source 1..80: mol_type = other DNA
tgttggcgaggctgtggggaaacaggcactctcatacattgctggtgggaatgcaaaatggtacaacccttatggagggg

SEQ ID NO: 63 - DNA, 80 bp, synthetic construct
  misc_feature 1..80: note = Synthetic: DF0000285.4:START3201:INDEX223:OBS1
  source 1..80: mol_type = other DNA
cccgattaaaaaatgggcaaaagacctgaacagacacctcaccaaagaagatatacagatggcaaataagcatatgaaaa

SEQ ID NO: 64 - DNA, 80 bp, synthetic construct
  misc_feature 1..80: note = Synthetic: DF0000360.4:START81:INDEX375:OBS1
  source 1..80: mol_type = other DNA
cctccttgctgttcctcgaacacgccaagctcactcccgcctcagggcctttgcacatgctgttccctctgcctggaacg

SEQ ID NO: 65 - DNA, 80 bp, synthetic construct
  misc_feature 1..80: note = Synthetic: DF0000280.4:START2081:INDEX809:OBS1
  source 1..80: mol_type = other DNA
cctctagatctaactaccaatttacaggaaatacaggggacagaggaacatgttaaacgacaccacggggatgcaatcag

SEQ ID NO: 66 - DNA, 80 bp, synthetic construct
  misc_feature 1..80: note = Synthetic: DF0001070.4:START561:INDEX431:OBS2
  source 1..80: mol_type = other DNA
cgccatcccgtctaggaagtgaggagcgtctctgcccggccgcccatcgtctgagatgtggggagcgcctctgccccgcc

SEQ ID NO: 67 - DNA, 80 bp, synthetic construct
  misc_feature 1..80: note = Synthetic: DF0000029.4:START81:INDEX764:OBS1
  source 1..80: mol_type = other DNA
ctctttttgtagaatctgcaagtggatatttggagcgctttgaggcctacggtggaaaaggaaatatcttcacataaaaa

SEQ ID NO: 68 - DNA, 80 bp, synthetic construct
  misc_feature 1..80: note = Synthetic: DF0001198.2:START1367:INDEX658:OBS1
  source 1..80: mol_type = other DNA
ctgtccccctgggaccctcacgaaaacgagatgtatatctcatgaggctatcccagcgagcaaaattttaaataaataaa

SEQ ID NO: 69 - DNA, 80 bp, synthetic construct
  misc_feature 1..80: note = Synthetic: DF0000247.4:START641:INDEX423:OBS1
  source 1..80: mol_type = other DNA
gagagggcccggcggaaagtaaaagccggggcagacttgaaaactgcctgaactttgaaagcgttccccaaaccacacac

SEQ ID NO: 70 - DNA, 80 bp, synthetic construct
  misc_feature 1..80: note = Synthetic: DF0000037.4:START230:INDEX783:OBS2
  source 1..80: mol_type = other DNA
gagatcgcgccactgcactccagcctggcgacagagcgagactccgtctcaaaaaaaaaaaaaaaaaaaaaaaaaaaaaa

SEQ ID NO: 71 - DNA, 80 bp, synthetic construct
  misc_feature 1..80: note = Synthetic: DF0000279.4:START1281:INDEX521:OBS1
  source 1..80: mol_type = other DNA
ggaaggctagaatgaaccctgtggtgttggattggaatcggaggtatcagtatgaactcatggtttttaacatatataca

SEQ ID NO: 72 - DNA, 80 bp, synthetic construct
  misc_feature 1..80: note = Synthetic: DF0000010.4:START2641:INDEX928:OBS1
  source 1..80: mol_type = other DNA
aaaaaaaaatatgtatatgcaaaaagagaatgataaagcaaatgtggcaaaatgttaacaattggagaatctgggtgaag

SEQ ID NO: 73 - DNA, 80 bp, synthetic construct
  misc_feature 1..80: note = Synthetic: DF0000284.4:START81:INDEX16:OBS1
  source 1..80: mol_type = other DNA
aaaaaaagccggataatctacaaaatcatacttttcttgagcccatcagagagctgaggtcgcaaggcaaccaagtaaac

SEQ ID NO: 74 - DNA, 80 bp, synthetic construct
  misc_feature 1..80: note = Synthetic: DF0000249.4:START2001:INDEX235:OBS1
  source 1..80: mol_type = other DNA
aaaaaaattattagtttatgtttttgggcacacaatgtataaagatgtaattttgtgacatcaacaactgaaaggggtgg

SEQ ID NO: 75 - DNA, 80 bp, synthetic construct
  misc_feature 1..80: note = Synthetic: DF0000279.4:START721:INDEX66:OBS1
  source 1..80: mol_type = other DNA
aaaaagaaacacaggaaggataaaccagaaactaatgagattggttacctacagggggtgggtgggaatggggagaaaga

SEQ ID NO: 76 - DNA, 80 bp, synthetic construct
  misc_feature 1..80: note = Synthetic: DF0000277.4:START561:INDEX725:OBS1
  source 1..80: mol_type = other DNA
aaaaagaaatgagctatcaagccacgaaaagacatggatgaatcttaaatgcatattgctaagtgaaagaagccagtctg

SEQ ID NO: 77 - DNA, 80 bp, synthetic construct
  misc_feature 1..80: note = Synthetic: DF0000249.4:START1041:INDEX788:OBS1
  source 1..80: mol_type = other DNA
aaaaagaaattctggagctgaaaagtacaataactgaaatgaaaaattcactagagggattcaaaagcagatttgagcag

SEQ ID NO: 78 - DNA, 80 bp, synthetic construct
  misc_feature 1..80: note = Synthetic: DF0000283.4:START561:INDEX92:OBS1
  source 1..80: mol_type = other DNA
aaaaagctaagaaacacttgtgaaggtcacagcccagggacacaggcccactaaaagactgagatttaatcataagatta

SEQ ID NO: 79 - DNA, 80 bp, synthetic construct
  misc_feature 1..80: note = Synthetic: DF0000010.4:START561:INDEX596:OBS1
  source 1..80: mol_type = other DNA
aaaaaggaatgaactactgatacacgcaaaaacatggatgaatcttaaatgcatattgctaagtgaaagaagccagacaa

SEQ ID NO: 80 - DNA, 80 bp, synthetic construct
  misc_feature 1..80: note = Synthetic: DF0000281.4:START561:INDEX234:OBS1
  source 1..80: mol_type = other DNA
aaaaaggaatgaggaagatctctatatactgatatggagtgatctccaggatatattgttaagtgaaaaaagcaaggtgc

SEQ ID NO: 81 - DNA, 80 bp, synthetic construct
  misc_feature 1..80: note = Synthetic: DF0000280.4:START561:INDEX440:OBS1
  source 1..80: mol_type = other DNA
aaaaaggaatgaggaatatctctatatactgctatggagtgatctccaggatatattgttaagtgaaaaaagcaaggtgg

SEQ ID NO: 82 - DNA, 80 bp, synthetic construct
  misc_feature 1..80: note = Synthetic: DF0000245.4:START2401:INDEX11:OBS1
  source 1..80: mol_type = other DNA
aaaaatatatagtaaaagaaacgaaaagggaattaaaatggtacactagaaaatatctattaaacacaaaagaaggcagt

SEQ ID NO: 83 - DNA, 80 bp, synthetic construct
  misc_feature 1..80: note = Synthetic: DF0000282.4:START401:INDEX795:OBS1
  source 1..80: mol_type = other DNA
aaaaatcccctcgtgcttccggcagggggaggggaaaaggaaccattttgaaatacgccagagcattctgttcttcttaa

SEQ ID NO: 84 - DNA, 80 bp, synthetic construct
  misc_feature 1..80: note = Synthetic: DF0000276.4:START961:INDEX623:OBS1
  source 1..80: mol_type = other DNA
gatgttaataataggggaaactgtgtgagggaggggtgagggggtatatgggaactctctgtactttctgctcaattttt

SEQ ID NO: 85 - DNA, 80 bp, synthetic construct
  misc_feature 1..80: note = Synthetic: DF0000320.4:START3041:INDEX528:OBS1
  source 1..80: mol_type = other DNA
ttaaactaaagagcttctgcacagcaaaagaaactatcatcagagtgaacaggcaacctacagaatgggagaaaattttt

SEQ ID NO: 86 - DNA, 80 bp, synthetic construct
  misc_feature 1..80: note = Synthetic: DF0000320.4:START241:INDEX721:OBS1
  source 1..80: mol_type = other DNA
aaaacagactttaaaccaacaaagatcaaaaaagacaaagaagggcattacataatggtaaagggatcaatgcaacaaga

SEQ ID NO: 87 - DNA, 80 bp, synthetic construct
  misc_feature 1..80: note = Synthetic: DF0000279.4:START561:INDEX711:OBS1
  source 1..80: mol_type = other DNA
aaaagaatgaggaagatctctatgaactgatatggagtgatttccaggatatattgttaagtgaaaaaagcaaagtgcaa

SEQ ID NO: 88 - DNA, 80 bp, synthetic construct
  misc_feature 1..80: note = Synthetic: DF0000245.4:START561:INDEX86:OBS1
  source 1..80: mol_type = other DNA
aaaaggaaaagctggggaatgagatgtccatagggggctttgaaaagctccgacatattcctgggaatctagaaggccac

SEQ ID NO: 89 - DNA, 80 bp, synthetic construct
  misc_feature 1..80: note = Synthetic: DF0000276.4:START641:INDEX756:OBS2
  source 1..80: mol_type = other DNA
aaaaggctacatactgtatgattccaactatatgacattctggaaaaggcaaaactatggagacagtaaaaagatcagtg

SEQ ID NO: 90 - DNA, 80 bp, synthetic construct
  misc_feature 1..80: note = Synthetic: DF0000283.4:START1:INDEX936:OBS1
  source 1..80: mol_type = other DNA
tgacatgtaaagagcttggaagtcgtcactcccttcaacaacaagaaaaagctgaacaaactgaaaaatcaacgactttt

SEQ ID NO: 91 - DNA, 80 bp, synthetic construct
  misc_feature 1..80: note = Synthetic: DF0000250.4:START241:INDEX527:OBS1
  source 1..80: mol_type = other DNA
aaaatagactttaagacaaaaaatgttactagagacaaagaaggacattttataatgataaaagggtcaatccatcagga

SEQ ID NO: 92 - DNA, 80 bp, synthetic construct
  misc_feature 1..80: note = Synthetic: DF0001250.2:START161:INDEX213:OBS1
  source 1..80: mol_type = other DNA
cggcagagccccagtttgctgaccttcagggcacggtgcaagacgcatcttttaaattggcattttataattgatatttt

SEQ ID NO: 93 - DNA, 80 bp, synthetic construct
  misc_feature 1..80: note = Synthetic: DF0001198.2:START481:INDEX320:OBS1
  source 1..80: mol_type = other DNA
tccgactttaataagctggaagaatggttcttctccaataagtcgattttaaatgaaattaaaaccaaaaccatgatttt

SEQ ID NO: 94 - DNA, 80 bp, synthetic construct
  misc_feature 1..80: note = Synthetic: DF0000248.4:START161:INDEX921:OBS1
  source 1..80: mol_type = other DNA
aaaatctactaaatctcggtaagaacagcgagagtctgtggcatttgagccacgacccgctccctcctcccccctcccca

SEQ ID NO: 95 - DNA, 80 bp, synthetic construct
  misc_feature 1..80: note = Synthetic: DF0000247.4:START961:INDEX91:OBS1
  source 1..80: mol_type = other DNA
aaacaaaacaacaacaacaaccctcaggggggaaaaatcagaatccagagttgctacaatatattatctaaaatgtccag

SEQ ID NO: 96 - DNA, 80 bp, synthetic construct
  misc_feature 1..80: note = Synthetic: DF0000246.4:START881:INDEX29:OBS1
  source 1..80: mol_type = other DNA
aaacaaacaaaacaacaacaacaaccctcaggaaaaaaaaacagaatccagagtcgctacaatatattatctaaaatgtc

SEQ ID NO: 97 - DNA, 80 bp, synthetic construct
  misc_feature 1..80: note = Synthetic: DF0000245.4:START961:INDEX881:OBS1
  source 1..80: mol_type = other DNA
aaacaaacagcaacaacaacaacaaacagcaacaacaacaaaccctggggaggggggagaatctgatttccagagttgcc

SEQ ID NO: 98 - DNA, 80 bp, synthetic construct
  misc_feature 1..80: note = Synthetic: DF0000010.4:START481:INDEX918:OBS1
  source 1..80: mol_type = other DNA
aaacaaccaagatgtccttcaacaggtgaatggataaacaaactgtggtacatccatacaatggaatactactcagcgat

SEQ ID NO: 99 - DNA, 80 bp, synthetic construct
  misc_feature 1..80: note = Synthetic: DF0000250.4:START2721:INDEX588:OBS1
  source 1..80: mol_type = other DNA
aaacccatacatttatggtcaattgattttcgacaagggtgccaagacaattcaatggggaaagaatagtcttttcaaca

SEQ ID NO: 100 - DNA, 80 bp, synthetic construct
  misc_feature 1..80: note = Synthetic: DF0000278.4:START2081:INDEX807:OBS1
  source 1..80: mol_type = other DNA
aaaccttcctaaataccaaaagaaattttaaaaataaagaaaacaaatcacatgaaacaaagaaaatacaatataataca

SEQ ID NO: 101 - DNA, 80 bp, synthetic construct
  misc_feature 1..80: note = Synthetic: DF0000248.4:START961:INDEX955:OBS1
  source 1..80: mol_type = other DNA
aaactacccctgcaaaggggcccgaatttaattggatcagactgtggagcaatttatgccccagggcattgtcgaaaaca

SEQ ID NO: 102 - DNA, 80 bp, synthetic construct
  misc_feature 1..80: note = Synthetic: DF0000275.4:START881:INDEX937:OBS1
  source 1..80: mol_type = other DNA
aaactatggactttgggtgataatgatgtgtcaatgtaggttcatcgattgtaacaaatgtaccactctggtgggggatg

SEQ ID NO: 103 - DNA, 80 bp, synthetic construct
  misc_feature 1..80: note = Synthetic: DF0000245.4:START1681:INDEX121:OBS1
  source 1..80: mol_type = other DNA
aaactcaaagagatccacaccaagacacatcataatcaaactgtcgaaagccaaagacaaagagagaatcttgaaagcag

SEQ ID NO: 104 - DNA, 80 bp, synthetic construct
  misc_feature 1..80: note = Synthetic: DF0000320.4:START721:INDEX635:OBS1
  source 1..80: mol_type = other DNA
aaactcactcaaaaccgcacaactacatggaaactgaacaacctgctcctgaatgactactgggtaaataacgaaattaa

SEQ ID NO: 105 - DNA, 80 bp, synthetic construct
  misc_feature 1..80: note = Synthetic: DF0000278.4:START881:INDEX900:OBS1
  source 1..80: mol_type = other DNA
aaactgaattaaatatactcaaacaagcatttgaggatataaaaaaaaactaccttgaatcagaaattcaaaaactaaga

SEQ ID NO: 106 - DNA, 80 bp, synthetic construct
  misc_feature 1..80: note = Synthetic: DF0000278.4:START1441:INDEX241:OBS1
  source 1..80: mol_type = other DNA
aaagaaaaaatcctcagggcctccaggcaaaaagatcaaataacttacaaaggaaaaagaattagactggcatcagactt

SEQ ID NO: 107 - DNA, 80 bp, synthetic construct
  misc_feature 1..80: note = Synthetic: DF0000249.4:START1681:INDEX654:OBS1
  source 1..80: mol_type = other DNA
aaagctgagggagttcgttaccactagacctgccctacaagaaatgctaaagggagtccttcaggttgaaatgaaaggac

SEQ ID NO: 108 - DNA, 80 bp, synthetic construct
  misc_feature 1..80: note = Synthetic: DF0000278.4:START1761:INDEX794:OBS1
  source 1..80: mol_type = other DNA
aaaggactgatggtgagcatttaataatatttaattgtagatctaagactaaaacaaagtggggacaagggtggaagaat

SEQ ID NO: 109 - DNA, 80 bp, synthetic construct
  misc_feature 1..80: note = Synthetic: DF0000278.4:START2001:INDEX180:OBS1
  source 1..80: mol_type = other DNA
aaagattaaataagaaaaaaggggactaagggcattataaaaaagtataagtacaaaggtaaccactagaacaaaaatac

SEQ ID NO: 110 - DNA, 80 bp, synthetic construct
  misc_feature 1..80: note = Synthetic: DF0000008.4:START241:INDEX849:OBS1
  source 1..80: mol_type = other DNA
aaagtagacttcaaggcaagaaatattaccagagataaagagggacatttcataatgataaaagggtcaattcatcaaga

SEQ ID NO: 111 - DNA, 80 bp, synthetic construct
  misc_feature 1..80: note = Synthetic: DF0000281.4:START1841:INDEX729:OBS1
  source 1..80: mol_type = other DNA
aaagttcttctttatagaagaattccagctaataaatgcagaaggaatgatagaattagaaaatcaccattttgcaaccc

SEQ ID NO: 112 - DNA, 80 bp, synthetic construct
  misc_feature 1..80: note = Synthetic: DF0000008.4:START2081:INDEX904:OBS1
  source 1..80: mol_type = other DNA
aaataaaactgtcattattcgcagatgacatgattgtatacgtagaaaatccaaaagaatctacaaaaaaactactagaa

SEQ ID NO: 113 - DNA, 80 bp, synthetic construct
  misc_feature 1..80: note = Synthetic: DF0000285.4:START2081:INDEX513:OBS1
  source 1..80: mol_type = other DNA
aaataaaactgtctttgttcgcagatgacatgattgtctatgtagaaaatccgaaagaatcgacaaaaaaactcctggaa

SEQ ID NO: 114 - DNA, 80 bp, synthetic construct
  misc_feature 1..80: note = Synthetic: DF0000284.4:START1441:INDEX203:OBS1
  source 1..80: mol_type = other DNA
aaataactatgattaatatgttaaaggatctagtggaaaaaaggtggacaacatgcaagaacagatgggaaatttcagca

SEQ ID NO: 115 - DNA, 80 bp, synthetic construct
  misc_feature 1..80: note = Synthetic: DF0000280.4:START641:INDEX791:OBS1
  source 1..80: mol_type = other DNA
agaaaagtgtgtatagtatgctaccgtttatctaagaaagggggatataaatatataaatatacgtatttgcttatattt

SEQ ID NO: 116 - DNA, 80 bp, synthetic construct
  misc_feature 1..80: note = Synthetic: DF0000285.4:START3041:INDEX500:OBS1
  source 1..80: mol_type = other DNA
ttaaaattaaaaacttctgctctgcgaaagacactgtcaagagaatgaaaagacaagccacagactgggagaaaatattt

SEQ ID NO: 117 - DNA, 80 bp, synthetic construct
  misc_feature 1..80: note = Synthetic: DF0000008.4:START3041:INDEX564:OBS1
  source 1..80: mol_type = other DNA
tcaaaattaaaaacttctgctcatcaaaagacaccgttaagaaaatgaaaaggcaagccacagaatgggagaaaatattt

SEQ ID NO: 118 - DNA, 80 bp, synthetic construct
  misc_feature 1..80: note = Synthetic: DF0000250.4:START3041:INDEX858:OBS1
  source 1..80: mol_type = other DNA
tcaaaattaaaaacttttgtgcttcaaaggacactatcaagaaagtgaaaagacaacccacagaatgggagaaaatattt

SEQ ID NO: 119 - DNA, 80 bp, synthetic construct
  misc_feature 1..80: note = Synthetic: DF0000250.4:START1041:INDEX190:OBS1
  source 1..80: mol_type = other DNA
aaatgaaatagagaatagaaaaacaatagagaaaatcaacgaaaccaaaagttggttctttgaaaagatcaacaaaattg

SEQ ID NO: 120 - DNA, 80 bp, synthetic construct
  misc_feature 1..80: note = Synthetic: DF0000249.4:START1921:INDEX245:OBS1
  source 1..80: mol_type = other DNA
tctaaaagctagtattattgtaactttggtttgtaactccacattttgttttctacataatttaagagactaatgcattt

SEQ ID NO: 121 - DNA, 80 bp, synthetic construct
  misc_feature 1..80: note = Synthetic: DF0000010.4:START241:INDEX848:OBS1
  source 1..80: mol_type = other DNA
aaatgctggcgaggatgtggagcaacaggaactctcatacattgctggtgggaatgcaaaatggtacagccactttggaa

SEQ ID NO: 122 - DNA, 80 bp, synthetic construct
  misc_feature 1..80: note = Synthetic: DF0000280.4:START1841:INDEX735:OBS1
  source 1..80: mol_type = other DNA
gatgaggggaagtttctctttatagaagtattccagctaataaatgaagaaggaatgatagaattagaatatcaccattt

SEQ ID NO: 123 - DNA, 80 bp, synthetic construct
  misc_feature 1..80: note = Synthetic: DF0000245.4:START2161:INDEX847:OBS1
  source 1..80: mol_type = other DNA
atatgatttaaaagacaaatgcataaagcaataattataaatctgtgttgatgggcacacaatgtataaagatgtaattt

SEQ ID NO: 124 - DNA, 80 bp, synthetic construct
  misc_feature 1..80: note = Synthetic: DF0000249.4:START801:INDEX194:OBS1
  source 1..80: mol_type = other DNA
aacaaaaaatcacaaggcatacaaagaaacaggaaagtatggcccattcaaaggaaaaaaataaatcaacagaaactgtc

SEQ ID NO: 125 - DNA, 80 bp, synthetic construct
  misc_feature 1..80: note = Synthetic: DF0000279.4:START1201:INDEX870:OBS1
  source 1..80: mol_type = other DNA
aacaaataagtaaatatattgtagataatgagagccaggtttctcactgtcggagaaagaagttacaaataaggaaaggg

SEQ ID NO: 126 - DNA, 80 bp, synthetic construct
  misc_feature 1..80: note = Synthetic: DF0000285.4:START561:INDEX386:OBS1
  source 1..80: mol_type = other DNA
aacagcagaatacacattcttctcaagctcacatggaacattcaccaagatagaccacattctgggccataaaacacacc

SEQ ID NO: 127 - DNA, 80 bp, synthetic construct
  misc_feature 1..80: note = Synthetic: DF0000010.4:START2001:INDEX36:OBS1
  source 1..80: mol_type = other DNA
aacaggatatttacatagtctcaaagtatctccccacaaaatacttattaattacaaaggggaaaatagtaactttacag

SEQ ID NO: 128 - DNA, 80 bp, synthetic construct
  misc_feature 1..80: note = Synthetic: DF0000010.4:START321:INDEX646:OBS1
  source 1..80: mol_type = other DNA
aacagtttggcagtttcttaaaaagctaaacatacaattaccatatgacccagcaatcacactcctaggtatttacccaa

SEQ ID NO: 129 - DNA, 80 bp, synthetic construct
  misc_feature 1..80: note = Synthetic: DF0000320.4:START2401:INDEX931:OBS1
  source 1..80: mol_type = other DNA
aacattccatgctcatggataggaagaatcaatatcgtgaaaatggccatactgcccaaagtaatttatagattcaatgc

SEQ ID NO: 130 - DNA, 80 bp, synthetic construct
  misc_feature 1..80: note = Synthetic: DF0001250.2:START81:INDEX750:OBS1
  source 1..80: mol_type = other DNA
aattccatccgcagggagcggaagacgggacgttttccgcggagggccctcgtttgtggaattccctgcccgccctggtt

SEQ ID NO: 131 - DNA, 80 bp, synthetic construct
  misc_feature 1..80: note = Synthetic: DF0000319.4:START321:INDEX907:OBS1
  source 1..80: mol_type = other DNA
aacccacgccaccggggcctagcgtcccaaccccggagccgcgcagattctcaacagcctctcagctggaatctgcttaa

SEQ ID NO: 132 - DNA, 80 bp, synthetic construct
  misc_feature 1..80: note = Synthetic: DF0000320.4:START2721:INDEX433:OBS1
  source 1..80: mol_type = other DNA
aacgccacacatctacaaccatctgatctttgacaaacctgacaaaaacaagcaatggggaaaggattccctatttaata

SEQ ID NO: 133 - DNA, 80 bp, synthetic construct
  misc_feature 1..80: note = Synthetic: DF0000008.4:START561:INDEX350:OBS1
  source 1..80: mol_type = other DNA
aacagcagaatacacattcttttcaagtgcacatggaacatttaccaagatagaccatatactgggccataaaacaagtc

SEQ ID NO: 134 - DNA, 80 bp, synthetic construct
  misc_feature 1..80: note = Synthetic: DF0000318.4:START1441:INDEX716:OBS1
  source 1..80: mol_type = other DNA
aactggacggagaatgagtttgacgaattgacagaagtaggcttcagaaggtgggtaataacaaactcctccgagctaaa

SEQ ID NO: 135 - DNA, 80 bp, synthetic construct
  misc_feature 1..80: note = Synthetic: DF0000318.4:START1521:INDEX481:OBS1
  source 1..80: mol_type = other DNA
ggagcatgttctaacccaatgcaaggaagctaagaaccttgaaaaaaggttagaggaattgctaactagaataaccagtt

SEQ ID NO: 136 - DNA, 80 bp, synthetic construct
  misc_feature 1..80: note = Synthetic: DF0000278.4:START1121:INDEX413:OBS1
  source 1..80: mol_type = other DNA
aagaaaggcaggaaaaaaacaacaagagaataaagaaaatgagataaaggaaagaagtaaaaagggtcagagagaaagtg

SEQ ID NO: 137 - DNA, 80 bp, synthetic construct
  misc_feature 1..80: note = Synthetic: DF0000245.4:START2001:INDEX697:OBS1
  source 1..80: mol_type = other DNA
aagaaatgctaaagggagtccttcaggctgaaatgaaaggacactagacagtaactcgaatccacatgaagaaataaaga

SEQ ID NO: 138 - DNA, 80 bp, synthetic construct
  misc_feature 1..80: note = Synthetic: DF0000246.4:START1841:INDEX198:OBS1
  source 1..80: mol_type = other DNA
aagacattttcagataaacaaaaactgagagaattcgtcgctagcagacctgcactacaagaaatgctaaaggaagtcct

SEQ ID NO: 139 - DNA, 80 bp, synthetic construct
  misc_feature 1..80: note = Synthetic: DF0000285.4:START801:INDEX492:OBS1
  source 1..80: mol_type = other DNA
aagagaaatttaaaaatattttgaactaaatgaaaatgaaaatacaacttatcaaaatttgtgggatgcagcgaaagcag

SEQ ID NO: 140 - DNA, 80 bp, synthetic construct
  misc_feature 1..80: note = Synthetic: DF0000277.4:START1921:INDEX831:OBS1
  source 1..80: mol_type = other DNA
aagagtacagtatggaaaggggggaaaaaagagtaactttacagtggagaaacctgacaaacactacctcagccaggtga

SEQ ID NO: 141 - DNA, 80 bp, synthetic construct
  misc_feature 1..80: note = Synthetic: DF0000279.4:START641:INDEX186:OBS1
  source 1..80: mol_type = other DNA
aagagtatatatagtatgctacctttcgtgtaagaaagaagggaaaataagaaaatatacatgtatctgctcatttgtgc

SEQ ID NO: 142 - DNA, 80 bp, synthetic construct
  misc_feature 1..80: note = Synthetic: DF0000281.4:START401:INDEX692:OBS1
  source 1..80: mol_type = other DNA
aagatacactagcaaaaatacgaaaagacgtatgcacaaggttattcattgcagcattatttgtaatagcaaaagactgg

SEQ ID NO: 143 - DNA, 80 bp, synthetic construct
  misc_feature 1..80: note = Synthetic: DF0000285.4:START721:INDEX657:OBS1
  source 1..80: mol_type = other DNA
aagatagctggaaaatcccaaaatacttggagattaaacaacacacttctaaataacacatgggtcaaagaagaaatctc

SEQ ID NO: 144 - DNA, 80 bp, synthetic construct
  misc_feature 1..80: note = Synthetic: DF0000008.4:START721:INDEX895:OBS1
  source 1..80: mol_type = other DNA
aagataactagaaaatccccaaatatttggaaattaaacaacacacttctaaataacccatgggtcaaagaagaaatcac

SEQ ID NO: 145 - DNA, 80 bp, synthetic construct
  misc_feature 1..80: note = Synthetic: DF0000281.4:START1201:INDEX196:OBS1
  source 1..80: mol_type = other DNA
aagattttcagcgtaagagaaaagagatacaaatataaaatcaaagaagttaagtaaaaaccctgtaatattaaatttga

SEQ ID NO: 146 - DNA, 80 bp, synthetic construct
  misc_feature 1..80: note = Synthetic: DF0000277.4:START481:INDEX954:OBS2
  source 1..80: mol_type = other DNA
aagcaaccaagatgtccttcaataggtgaatggataaacaaactgtggtacatccatacaatggaatattattcagcgat

SEQ ID NO: 147 - DNA, 80 bp, synthetic construct
  misc_feature 1..80: note = Synthetic: DF0000248.4:START561:INDEX211:OBS1
  source 1..80: mol_type = other DNA
aagccgagaagaccagaggctaccgcccccgcccagcgccctgctcataaagcaggggtgtcactccgagagaagcgggc

SEQ ID NO: 148 - DNA, 80 bp, synthetic construct
  misc_feature 1..80: note = Synthetic: DF0000247.4:START801:INDEX191:OBS1
  source 1..80: mol_type = other DNA
aagctatgctgacacaggggcgacccctaggaagccaggcttaaaaataaaaacaagaataaaaaaaaaactgagcagag

SEQ ID NO: 149 - DNA, 80 bp, synthetic construct
  misc_feature 1..80: note = Synthetic: DF0000245.4:START481:INDEX511:OBS1
  source 1..80: mol_type = other DNA
cagaggcaattgtttaacatcgcagctgcctgaggcggtggataacagttggggcaaacaaaaggctgaccaaaaagctt

SEQ ID NO: 150 - DNA, 80 bp, synthetic construct
  misc_feature 1..80: note = Synthetic: DF0000279.4:START1681:INDEX279:OBS1
  source 1..80: mol_type = other DNA
aaggagctcccaatggccaaaactggaacaatttgagcaacaaaataaataatgatagtaatggattataacccatagaa

SEQ ID NO: 151 - DNA, 80 bp, synthetic construct
  misc_feature 1..80: note = Synthetic: DF0000248.4:START1:INDEX356:OBS1
  source 1..80: mol_type = other DNA
aaggagttccacttccggaatggcggcgtgaggagctccgcggacccgctccccagcgaaacaaccataactggtgaaaa

SEQ ID NO: 152 - DNA, 80 bp, synthetic construct
  misc_feature 1..80: note = Synthetic: DF0000250.4:START801:INDEX797:OBS1
  source 1..80: mol_type = other DNA
aagggaaattagaaaatactttgagatgaatgaaaacgaaaacacaacataccaaaacttatgggatgcagcaaaagcag

SEQ ID NO: 153 - DNA, 80 bp, synthetic construct
  misc_feature 1..80: note = Synthetic: DF0000250.4:START2081:INDEX736:OBS1
  source 1..80: mol_type = other DNA
aagtaaaactatctctattcgcagatgacatgatcttgtatatagaaaatcctaaggaatccacaaaaaaactattagaa

SEQ ID NO: 154 - DNA, 80 bp, synthetic construct
  misc_feature 1..80: note = Synthetic: DF0000320.4:START2081:INDEX645:OBS1
  source 1..80: mol_type = other DNA
aagtcaaattgtctctgtttgcagatgacatgattgtatatttagaaaaccccatcgtctcagcccaaaaactccttaag

SEQ ID NO: 155 - DNA, 80 bp, synthetic construct
  misc_feature 1..80: note = Synthetic: DF0000279.4:START801:INDEX932:OBS1
  source 1..80: mol_type = other DNA
atgggggatgggaacgggatggaagggatgaggagggagtgacacttctctgagtatacctttttgtatagttctgactt

SEQ ID NO: 156 - DNA, 80 bp, synthetic construct
  misc_feature 1..80: note = Synthetic: DF0000247.4:START2321:INDEX805:OBS1
  source 1..80: mol_type = other DNA
aagttaagatgcatattgtaatccctagagcaaccactaagaaaataactcaaaaaaatatagttaaaaaatcaacagag

SEQ ID NO: 157 - DNA, 80 bp, synthetic construct
  misc_feature 1..80: note = Synthetic: DF0000245.4:START241:INDEX57:OBS1
  source 1..80: mol_type = other DNA
ggtagccttgaaaaccaacagcccgcaatcacggtgaaaaccagcagcctggcagccactggagggggcagaacgggatt

SEQ ID NO: 158 - DNA, 80 bp, synthetic construct
  misc_feature 1..80: note = Synthetic: DF0000008.4:START801:INDEX383:OBS1
  source 1..80: mol_type = other DNA
aaaggaaattagaaaatattttgaactgaatgaaaatgaaaatacaacatatcaaaatttgtgggatgcagctaaagcag

SEQ ID NO: 159 - DNA, 80 bp, synthetic construct
  misc_feature 1..80: note = Synthetic: DF0000278.4:START161:INDEX917:OBS1
  source 1..80: mol_type = other DNA
aaataactgtaagtaaaaagagaaaaatcaccaaatcccagcgagcgatctctcatgctcctgcccacccctgctcctgc

SEQ ID NO: 160 - DNA, 80 bp, synthetic construct
  misc_feature 1..80: note = Synthetic: DF0000248.4:START1281:INDEX133:OBS1
  source 1..80: mol_type = other DNA
aataaacaagcaaacaacaacaacaagccgggggaggggaatcagtatccagagttgctacaatatattatctaaaatgt

SEQ ID NO: 161 - DNA, 80 bp, synthetic construct
  misc_feature 1..80: note = Synthetic: DF0000282.4:START1761:INDEX369:OBS1
  source 1..80: mol_type = other DNA
actcggatctacataaagaaaggaagagcatcagagaaggaataagtgaaggtaaaataaaaacttttatttttcttatt

SEQ ID NO: 162 - DNA, 80 bp, synthetic construct
  misc_feature 1..80: note = Synthetic: DF0000976.4:START189:INDEX207:OBS1
  source 1..80: mol_type = other DNA
gaggatcaaatgagataatgtatgtgaaagcgctttgtaaactgtaaagtgctatacaaatgtaaggagttattattatt

SEQ ID NO: 163 - DNA, 80 bp, synthetic construct
  misc_feature 1..80: note = Synthetic: DF0000975.4:START189:INDEX261:OBS1
  source 1..80: mol_type = other DNA
taaatgagataatgcatgtaaagcgcttagcacagtgcctggcacatagtaagcgctcaataaatggtagctctattatt

SEQ ID NO: 164 - DNA, 80 bp, synthetic construct
  misc_feature 1..80: note = Synthetic: DF0000001.4:START183:INDEX702:OBS1
  source 1..80: mol_type = other DNA
attaaatgagttaatacatgtaaagcgcttagaacagtgcctggcacatagtaagcgctcaataaatgttagctattatt

SEQ ID NO: 165 - DNA, 80 bp, synthetic construct
  misc_feature 1..80: note = Synthetic: DF0001333.2:START603:INDEX226:OBS1
  source 1..80: mol_type = other DNA
ttgtattatttaactctgtaaagcgttttgggatacagtttgtatgaaagacgctatacaaaataaagttgtattgtatt

SEQ ID NO: 166 - DNA, 80 bp, synthetic construct
  misc_feature 1..80: note = Synthetic: DF0001250.2:START241:INDEX283:OBS1
  source 1..80: mol_type = other DNA
aatatatgctgataactgctgctgctctgttttatgtattttaattaaatgttttaaattttgtacttgcgccctgaggc

SEQ ID NO: 167 - DNA, 80 bp, synthetic construct
  misc_feature 1..80: note = Synthetic: DF0000278.4:START1841:INDEX559:OBS1
  source 1..80: mol_type = other DNA
aatatgtaaatgttatatgttctgacaaagtagaaataatgcaactaaaaaatgggaggagagagggggaaaggagaaag

SEQ ID NO: 168 - DNA, 80 bp, synthetic construct
  misc_feature 1..80: note = Synthetic: DF0000280.4:START2241:INDEX230:OBS1
  source 1..80: mol_type = other DNA
agggggaacctatagattaaaagagacttaagagacatatcaaccaatcgcaatgtatggaccttatttggatcctgatt

SEQ ID NO: 169 - DNA, 80 bp, synthetic construct
  misc_feature 1..80: note = Synthetic: DF0000278.4:START1041:INDEX240:OBS1
  source 1..80: mol_type = other DNA
aatcatctcagaaatgaagactaaattacaaggtgcccaagggagaatagattcaaatgaaaatttaataaggggcattg

SEQ ID NO: 170 - DNA, 80 bp, synthetic construct
  misc_feature 1..80: note = Synthetic: DF0000278.4:START641:INDEX403:OBS1
  source 1..80: mol_type = other DNA
aatccactaaagaaactgaacttcgctacactgacagaagagggcgcccttgaactaggaatcttgtaaaacaccccaat

SEQ ID NO: 171 - DNA, 80 bp, synthetic construct
  misc_feature 1..80: note = Synthetic: DF0000008.4:START2481:INDEX820:OBS1
  source 1..80: mol_type = other DNA
aatcccaatcaaaatcccagcaggtttttttgtagaaattgacaagctgattctaaaatttatatggaaatgcaaaggac

SEQ ID NO: 172 - DNA, 80 bp, synthetic construct
  misc_feature 1..80: note = Synthetic: DF0000250.4:START2481:INDEX38:OBS1
  source 1..80: mol_type = other DNA
aatccctatcaaaatcccagctgacttttttgcagaaattgacaagctgatcctaaaattcatatggaaatgcaagggac

SEQ ID NO: 173 - DNA, 80 bp, synthetic construct
  misc_feature 1..80: note = Synthetic: DF0000318.4:START241:INDEX453:OBS1
  source 1..80: mol_type = other DNA
ctgtgccgtgaggaacggtgcactccggcccagatactacgcttttcccacggtcttcgcaacccgcagaccaggagatt

SEQ ID NO: 174 - DNA, 80 bp, synthetic construct
  misc_feature 1..80: note = Synthetic: DF0000008.4:START1:INDEX97:OBS1
  source 1..80: mol_type = other DNA
atggtagatttaaacccaaacatatcaataattacattaaatgtaaatggactaaacactccaattaaaaggcagagatt

SEQ ID NO: 175 - DNA, 80 bp, synthetic construct
  misc_feature 1..80: note = Synthetic: DF0000250.4:START1:INDEX717:OBS1
  source 1..80: mol_type = other DNA
atggcagacgtaaatccaaccatatcagtaattacattaaatgtaaatggattaaacactccaatcaaaaggcagagatt

SEQ ID NO: 176 - DNA, 80 bp, synthetic construct
  misc_feature 1..80: note = Synthetic: DF0000285.4:START1:INDEX700:OBS1
  source 1..80: mol_type = other DNA
atggtagatattaatccaactatatcaataatcactttaaatgtaaatggtctaaatacaccaattaaaagacagagatt

SEQ ID NO: 177 - DNA, 80 bp, synthetic construct
  misc_feature 1..80: note = Synthetic: DF0000248.4:START801:INDEX374:OBS1
  source 1..80: mol_type = other DNA
aatggagattttggtggtaagcaattaagaggaggctggtagctccatgagagcaacaagctaaaccgtaggccagctag

SEQ ID NO: 178 - DNA, 80 bp, synthetic construct
  misc_feature 1..80: note = Synthetic: DF0000245.4:START2481:INDEX255:OBS1
  source 1..80: mol_type = other DNA
aatggaggaatagaggaacaaaaaagacataagacatatagaaaacaaatagcaaaatggcagaagtaaatcctacctta

SEQ ID NO: 179 - DNA, 80 bp, synthetic construct
  misc_feature 1..80: note = Synthetic: DF0000010.4:START1841:INDEX815:OBS1
  source 1..80: mol_type = other DNA
gagaagggaaagctcttccttacagtagaatgccaactaataaatgtagaaggaatgatggaattagaaaaatcaccatt

SEQ ID NO: 180 - DNA, 80 bp, synthetic construct
  misc_feature 1..80: note = Synthetic: DF0000285.4:START2801:INDEX43:OBS1
  source 1..80: mol_type = other DNA
aatggtgctggaacaactggacatccacatgcaaaaaaatgaatctagacacagaccttacacccttcacaaaaattaac

SEQ ID NO: 181 - DNA, 80 bp, synthetic construct
  misc_feature 1..80: note = Synthetic: DF0000008.4:START2801:INDEX27:OBS1
  source 1..80: mol_type = other DNA
aatggtgctggaacaattggatatccatatggaaaaaaatgaaactcgacccctacctcacaccatacacaaaaattaat

SEQ ID NO: 182 - DNA, 80 bp, synthetic construct
  misc_feature 1..80: note = Synthetic: DF0000250.4:START2801:INDEX227:OBS1
  source 1..80: mol_type = other DNA
aatggtgctgggacaactggatatccacatgcaaaagaatgaagttggacccctacctcacaccatatacaaaaattaac

SEQ ID NO: 183 - DNA, 80 bp, synthetic construct
  misc_feature 1..80: note = Synthetic: DF0000320.4:START2801:INDEX251:OBS1
  source 1..80: mol_type = other DNA
aatggtgttgggaaaactggctagccatatgcagaaaactgaaactggaccccttccttacaccttatacaaaaattaac

SEQ ID NO: 184 - DNA, 80 bp, synthetic construct
  misc_feature 1..80: note = Synthetic: DF0000250.4:START1121:INDEX364:OBS1
  source 1..80: mol_type = other DNA
acaaacctttagctagactgaccaagaaaaaaagagagaagactcaaattactaaaatcaggaatgaaagaggggacatt

SEQ ID NO: 185 - DNA, 80 bp, synthetic construct
  misc_feature 1..80: note = Synthetic: DF0000277.4:START2081:INDEX297:OBS1
  source 1..80: mol_type = other DNA
ctgtggtcttcctcccaaaaacccataaccccagtctaatcatgagaaaaacatcagacaaatcccaattgagggacatt

SEQ ID NO: 186 - DNA, 80 bp, synthetic construct
  misc_feature 1..80: note = Synthetic: DF0000318.4:START561:INDEX594:OBS1
  source 1..80: mol_type = other DNA
aattctcgctgccagcacagcagtctgaagtcgacctgggacgctcgagcttggtggggggaggggcgtccgccattact

SEQ ID NO: 187 - DNA, 80 bp, synthetic construct
  misc_feature 1..80: note = Synthetic: DF0000279.4:START321:INDEX303:OBS1
  source 1..80: mol_type = other DNA
aatttggcaatatctaacaaaactacatatgcatttaccctttgacccagcaatcccacttctaggaatttaccctgaag

SEQ ID NO: 188 - DNA, 80 bp, synthetic construct
  misc_feature 1..80: note = Synthetic: DF0000282.4:START1681:INDEX894:OBS1
  source 1..80: mol_type = other DNA
aatttgttgccagtagacctgccttgcaagaaatgttaaaagaagttcttcagagagaaggaaaatgatataggtcagaa

SEQ ID NO: 189 - DNA, 80 bp, synthetic construct
  misc_feature 1..80: note = Synthetic: DF0000320.4:START2241:INDEX430:OBS1
  source 1..80: mol_type = other DNA
acaaacagagagccaaatcatgagtgaactcccattcacaattgctacaaagagaataaaatacctaggaatacaactta

SEQ ID NO: 190 - DNA, 80 bp, synthetic construct
  misc_feature 1..80: note = Synthetic: DF0000285.4:START2241:INDEX579:OBS1
  source 1..80: mol_type = other DNA
acaaatggaatttgaaattaaaaacacaataccatttacattagcacccccaaaaatgaaatacttaggtataaatctaa

SEQ ID NO: 191 - DNA, 80 bp, synthetic construct
  misc_feature 1..80: note = Synthetic: DF0000250.4:START2241:INDEX398:OBS1
  source 1..80: mol_type = other DNA
acaatccgaaaatgaaattaagaaaacaattccatttacaatagcatcaaaaagaataaaatacttaggaataaatttaa

SEQ ID NO: 192 - DNA, 80 bp, synthetic construct
  misc_feature 1..80: note = Synthetic: DF0000008.4:START2241:INDEX723:OBS1
  source 1..80: mol_type = other DNA
acaattggaaaatgaaatttaaaaaacaataccatttacaatagcatcaaaaaacataaaatacttaggaataaatctaa

SEQ ID NO: 193 - DNA, 80 bp, synthetic construct
  misc_feature 1..80: note = Synthetic: DF0000277.4:START1681:INDEX117:OBS1
  source 1..80: mol_type = other DNA
acaatttgagcaacaaaataaataaagtagtattggattataacccaaagtataaaataaatatccatgagtccatactg

SEQ ID NO: 194 - DNA, 80 bp, synthetic construct
  misc_feature 1..80: note = Synthetic: DF0000280.4:START881:INDEX552:OBS1
  source 1..80: mol_type = other DNA
taattataaaacaaaattaaatttaaaaaagcaatccctaaaaatcgaaagcaaaatgaaacaaatgaacctaactgtgt

SEQ ID NO: 195 - DNA, 80 bp, synthetic construct
  misc_feature 1..80: note = Synthetic: DF0000246.4:START1361:INDEX740:OBS1
  source 1..80: mol_type = other DNA
cagagagaaaaaagattgaagaaaaatgaacagagcctcagagacctgtgggacaatatcaagcgtaccaacatacgtgt

SEQ ID NO: 196 - DNA, 80 bp, synthetic construct
  misc_feature 1..80: note = Synthetic: DF0000280.4:START1041:INDEX46:OBS1
  source 1..80: mol_type = other DNA
gtgggatataccctaaggacaaaaagaactgcaaaaaaatcttaaactgttttcagtaatcatattgttggtggtagtgt

SEQ ID NO: 197 - DNA, 80 bp, synthetic construct
  misc_feature 1..80: note = Synthetic: DF0000278.4:START961:INDEX656:OBS1
  source 1..80: mol_type = other DNA
acagaaatggacaaaaaaataaaggaagaaatgaaaaaagagttgattgaactcaggaaagaaatagaagaaaaagacaa

SEQ ID NO: 198 - DNA, 80 bp, synthetic construct
  misc_feature 1..80: note = Synthetic: DF0000275.4:START961:INDEX944:OBS1
  source 1..80: mol_type = other DNA
ttgatagtgggggaggctgtgcatgtgtgggggcagggggtatatgggaaatctctgtaccttccgctcaattttgctgt

SEQ ID NO: 199 - DNA, 80 bp, synthetic construct
  misc_feature 1..80: note = Synthetic: DF0000053.4:START81:INDEX640:OBS1
  source 1..80: mol_type = other DNA
gaccatcccggctaaaacggtgaaaccccgtctctactaaaaatacaaaaaattagccgggcgtagtggcgggcgcctgt

SEQ ID NO: 200 - DNA, 80 bp, synthetic construct
  misc_feature 1..80: note = Synthetic: DF0000001.4:START1:INDEX247:OBS1
  source 1..80: mol_type = other DNA
acagtatagcatagtggttaagagcacgggctctggagccagactgcctgggttcgaatcccggctctgccacttactag

SEQ ID NO: 201 - DNA, 80 bp, synthetic construct
  misc_feature 1..80: note = Synthetic: DF0000281.4:START2001:INDEX50:OBS1
  source 1..80: mol_type = other DNA
atggaaggatcaggctgacaacacctgaacccactgatcaatcttagcatcactaaaagtgggacaaccagacattatgt

SEQ ID NO: 202 - DNA, 80 bp, synthetic construct
  misc_feature 1..80: note = Synthetic: DF0000281.4:START2561:INDEX649:OBS1
  source 1..80: mol_type = other DNA
acatactgaagtatttacgggtgaaatgatatgatgtctgggatttgctttaaaatactccaggagggaggaagtaggtg

SEQ ID NO: 203 - DNA, 80 bp, synthetic construct
  misc_feature 1..80: note = Synthetic: DF0000010.4:START1601:INDEX56:OBS1
  source 1..80: mol_type = other DNA
cagggaaagtacaagatgagcctggaacatcttgttgtgccagaaagtaaggaagtgctcaaagaatgatggggacatgt

SEQ ID NO: 204 - DNA, 80 bp, synthetic construct
  misc_feature 1..80: note = Synthetic: DF0000248.4:START3121:INDEX335:OBS1
  source 1..80: mol_type = other DNA
acattaaatgtgaatggattaaacaatccaatcaaaaggcagagattgtcagactggattaaaaaacaagatccaactat

SEQ ID NO: 205 - DNA, 80 bp, synthetic construct
  misc_feature 1..80: note = Synthetic: DF0000275.4:START801:INDEX901:OBS1
  source 1..80: mol_type = other DNA
atactataatggtggatacatgtcattatacatttgtccaaacccatagaatgtacaacaccaagagtgaaccctaatgt

SEQ ID NO: 206 - DNA, 80 bp, synthetic construct
  misc_feature 1..80: note = Synthetic: DF0000245.4:START1041:INDEX493:OBS1
  source 1..80: mol_type = other DNA
acattatattatttaaaatgtccagttttcaacaaaaaattacgagacatgcaaagaaacaagaaagtatggcccataca

SEQ ID NO: 207 - DNA, 80 bp, synthetic construct
  misc_feature 1..80: note = Synthetic: DF0000010.4:START2481:INDEX518:OBS1
  source 1..80: mol_type = other DNA
tctgtagattagataatagtattgtatcaatgttaatttcctgattttgataattgtactgtggttatgtaagagaatgt

SEQ ID NO: 208 - DNA, 80 bp, synthetic construct
  misc_feature 1..80: note = Synthetic: DF0000282.4:START1361:INDEX817:OBS1
  source 1..80: mol_type = other DNA
accaagcaggataaatgccaaaaaaaaaacaaaacgaaactacacctaggcatatcatattcaaactgcagaaaatcaaa

SEQ ID NO: 209 - DNA, 80 bp, synthetic construct
  misc_feature 1..80: note = Synthetic: DF0000320.4:START1201:INDEX754:OBS1
  source 1..80: mol_type = other DNA
accactgatcccacagaaatacaaactaccatcagagaatactataaacacctctacgcaaataaactagaaaatctaga

SEQ ID NO: 210 - DNA, 80 bp, synthetic construct
  misc_feature 1..80: note = Synthetic: DF0001333.2:START561:INDEX965:OBS1
  source 1..80: mol_type = other DNA
accactgttttctgtaatttataccatatactgtccgctgtcttgtattatttaactctgtaaagcgttttgggatacag

SEQ ID NO: 211 - DNA, 80 bp, synthetic construct
  misc_feature 1..80: note = Synthetic: DF0001198.2:START641:INDEX3:OBS1
  source 1..80: mol_type = other DNA
accagtttaaatatcttggaatctggctagatccctctcttactttcagcaaacatgcggattatattctctccaaggtg

SEQ ID NO: 212 - DNA, 80 bp, synthetic construct
  misc_feature 1..80: note = Synthetic: DF0000248.4:START2481:INDEX941:OBS1
  source 1..80: mol_type = other DNA
tatgtatataattgtattgttgggcctataacatatagaaatgtaatatatttgacaataacagcacaaaggaggtgggt

SEQ ID NO: 213 - DNA, 80 bp, synthetic construct
  misc_feature 1..80: note = Synthetic: DF0000246.4:START401:INDEX884:OBS1
  source 1..80: mol_type = other DNA
acccgcagctctgctagcctgaggttgcggtcccggttggggcgagcggcggaccagccagaaatttaacggggagatcc

SEQ ID NO: 214 - DNA, 80 bp, synthetic construct
  misc_feature 1..80: note = Synthetic: DF0000249.4:START561:INDEX660:OBS1
  source 1..80: mol_type = other DNA
accgcatatacggggaaaattagaaagtaaccgcgcatgcccagggaaaggcgcaggctcagaaaagacctgagaagacc

SEQ ID NO: 215 - DNA, 80 bp, synthetic construct
  misc_feature 1..80: note = Synthetic: DF0000318.4:START1041:INDEX332:OBS1
  source 1..80: mol_type = other DNA
acctcatacaggagagctccggctggcatctggcgggtgcccctctgggacgaagcttccagaggaaggaacaggcagca

SEQ ID NO: 216 - DNA, 80 bp, synthetic construct
  misc_feature 1..80: note = Synthetic: DF0001161.2:START235:INDEX270:OBS1
  source 1..80: mol_type = other DNA
ccgtcacggcaattgagatcagctaggatgctcctgctaacggttcccagatttgaaattcggggaaccggaggcgaggt

SEQ ID NO: 217 - DNA, 80 bp, synthetic construct
  misc_feature 1..80: note = Synthetic: DF0000283.4:START241:INDEX277:OBS1
  source 1..80: mol_type = other DNA
ttgctggaggctgagtgtggactagcatgagagtgagaaactcccgggggcccagtctaggggggcccccacactttcgt

SEQ ID NO: 218 - DNA, 80 bp, synthetic construct
  misc_feature 1..80: note = Synthetic: DF0000359.4:START161:INDEX693:OBS1
  source 1..80: mol_type = other DNA
acgctcttcccccagatatccgcatggctcgctccctcacctccttcaggtctttgctcaaatgtcaccttctcagagag

SEQ ID NO: 219 - DNA, 80 bp, synthetic construct
  misc_feature 1..80: note = Synthetic: DF0000245.4:START161:INDEX304:OBS1
  source 1..80: mol_type = other DNA
acggctgaatctcggtaagaacagcgagctttgtggcgttttaacttgccctattcccatccccctctccccagctccgc

SEQ ID NO: 220 - DNA, 80 bp, synthetic construct
  misc_feature 1..80: note = Synthetic: DF0000247.4:START401:INDEX777:OBS1
  source 1..80: mol_type = other DNA
acgacacagctagcctgaggttgcggtactggttggggcaagcaacagaccggcagactagccagaaatttaacagggag

SEQ ID NO: 221 - DNA, 80 bp, synthetic construct
  misc_feature 1..80: note = Synthetic: DF0000318.4:START1201:INDEX915:OBS1
  source 1..80: mol_type = other DNA
cctgcagcagaggggcctgactgttagaaggaaaactaacaaacagaaaggaatagcatcaacatcaacaaaaaggacgt

SEQ ID NO: 222 - DNA, 80 bp, synthetic construct
  misc_feature 1..80: note = Synthetic: DF0000008.4:START1201:INDEX517:OBS1
  source 1..80: mol_type = other DNA
actacagatcctacagacattaaaaggataataagagaatattatgaacaactttatgccaataaatttgaaaacttaga

SEQ ID NO: 223 - DNA, 80 bp, synthetic construct
  misc_feature 1..80: note = Synthetic: DF0000250.4:START1201:INDEX709:OBS1
  source 1..80: mol_type = other DNA
actaccgaccttacagaaataaaaaggattataagggaatactatgaacaattgtatgccaacaaattagataacctaga

SEQ ID NO: 224 - DNA, 80 bp, synthetic construct
  misc_feature 1..80: note = Synthetic: DF0000285.4:START1201:INDEX566:OBS1
  source 1..80: mol_type = other DNA
actacagatcccatggacattaaaaggataataaaggaatactatgaacaactctatgcccacaaatttgataacctaga

SEQ ID NO: 225 - DNA, 80 bp, synthetic construct
  misc_feature 1..80: note = Synthetic: DF0001067.4:START1308:INDEX897:OBS1
  source 1..80: mol_type = other DNA
actattatcctatgaccctgccacatccccctctccgagaaacacccaagaatgatcaataaatactaaaaaaaaaaaaa

SEQ ID NO: 226 - DNA, 80 bp, synthetic construct
  misc_feature 1..80: note = Synthetic: DF0001071.4:START1303:INDEX168:OBS3
  source 1..80: mol_type = other DNA
actattgtcctatgaccctgccaaatccccctctgcgagaaacacccaagaatgatcaataaaaaaaaaaaaaaaaaaaa

SEQ ID NO: 227 - DNA, 80 bp, synthetic construct
  misc_feature 1..80: note = Synthetic: DF0000073.4:START1:INDEX619:OBS1
  source 1..80: mol_type = other DNA
ggccgggcgcggtggctcacgcctgtaatcccagctcttagggaggcaaagaggcgggaggatagcttgagcccaggagt

SEQ ID NO: 228 - DNA, 80 bp, synthetic construct
  misc_feature 1..80: note = Synthetic: DF0000279.4:START2321:INDEX595:OBS1
  source 1..80: mol_type = other DNA
actgaggaactgtcacagattggaggagactaaggagacatgacaactaaatgcaatgtgggatcctggattggatcctg

SEQ ID NO: 229 - DNA, 80 bp, synthetic construct
  misc_feature 1..80: note = Synthetic: DF0000277.4:START961:INDEX185:OBS1
  source 1..80: mol_type = other DNA
actgtattacaaatgtatgaaacaacctcactgaagggggtgggggaaaaaggtgctgacctaagtaactttggaaatga

SEQ ID NO: 230 - DNA, 80 bp, synthetic construct
  misc_feature 1..80: note = Synthetic: DF0001198.2:START1121:INDEX466:OBS1
  source 1..80: mol_type = other DNA
actatgggaggcaggcttttggggttgcagccccaaacagctggaataagctacctgttccattaaaacaggcaccaaca

SEQ ID NO: 231 - DNA, 80 bp, synthetic construct
  misc_feature 1..80: note = Synthetic: DF0001198.2:START881:INDEX115:OBS1
  source 1..80: mol_type = other DNA
ataaactctgcggaattgcactttcttgtgaactcaggacccatcgttgtgacctctacaatcgacttaattggccaagt

SEQ ID NO: 232 - DNA, 80 bp, synthetic construct
  misc_feature 1..80: note = Synthetic: DF0001198.2:START1041:INDEX765:OBS1
  source 1..80: mol_type = other DNA
acttttatccaatgcagactgcaaatatgcccttcgctcgacccagtctattaattttaaagtgcctagagccaaaactg

SEQ ID NO: 233 - DNA, 80 bp, synthetic construct
  misc_feature 1..80: note = Synthetic: DF0000246.4:START1201:INDEX118:OBS1
  source 1..80: mol_type = other DNA
agaaactataaaaaagaaccaaatggaaattctagagctgaaaagtacaataactgaaatgaaaaattcactagatgggc

SEQ ID NO: 234 - DNA, 80 bp, synthetic construct
  misc_feature 1..80: note = Synthetic: DF0000320.4:START1281:INDEX621:OBS1
  source 1..80: mol_type = other DNA
agaaatggataaattcctggacacatacaccctcccaagactaaaccaggaagaagtcgaatccctgaatagaccaataa

SEQ ID NO: 235 - DNA, 80 bp, synthetic construct
  misc_feature 1..80: note = Synthetic: DF0000278.4:START81:INDEX345:OBS1
  source 1..80: mol_type = other DNA
agaacaacaagaaggaaaataaaactacacaaaaaccacgccctcagcataacttgaagacagagaatgcccaaacttca

SEQ ID NO: 236 - DNA, 80 bp, synthetic construct
  misc_feature 1..80: note = Synthetic: DF0000278.4:START1281:INDEX465:OBS1
  source 1..80: mol_type = other DNA
agaactaatatttaaaactataatccaagaaaactttccggaaataaaagaaaaagacctgaatctacatattgaaaggg

SEQ ID NO: 237 - DNA, 80 bp, synthetic construct
  misc_feature 1..80: note = Synthetic: DF0000016.4:START1:INDEX343:OBS1
  source 1..80: mol_type = other DNA
gccgggcgcggtggcgcgcgcctgtagtcccagctactcgggaggctgaggcgggaggatcgcttgagcccaggagttct

SEQ ID NO: 238 - DNA, 80 bp, synthetic construct
  misc_feature 1..80: note = Synthetic: DF0000245.4:START1841:INDEX123:OBS1
  source 1..80: mol_type = other DNA
agaaggcagtgggatgacatattcaaagtgctgaaagaaaaagactgtcaaccaagaattctatatccggcaaaactatc

SEQ ID NO: 239 - DNA, 80 bp, synthetic construct
  misc_feature 1..80: note = Synthetic: DF0000250.4:START1921:INDEX822:OBS1
  source 1..80: mol_type = other DNA
atcatacttaatggtgaaagactgaaagctttccccctaagatcaggaacaagacaaggatgtccgctctcgccacttct

SEQ ID NO: 240 - DNA, 80 bp, synthetic construct
  misc_feature 1..80: note = Synthetic: DF0000277.4:START721:INDEX653:OBS1
  source 1..80: mol_type = other DNA
gttgccaggggttcggggagaagggggaagggttgaataggtgaagcacaggggattttttagggcggtgaaactattct

SEQ ID NO: 241 - DNA, 80 bp, synthetic construct
  misc_feature 1..80: note = Synthetic: DF0000008.4:START321:INDEX192:OBS1
  source 1..80: mol_type = other DNA
agacataacaatcctaaatgtgtatgcacctaataacagagcttcaaaatacatgaagcaaaaactgacagaactaaaag

SEQ ID NO: 242 - DNA, 80 bp, synthetic construct
  misc_feature 1..80: note = Synthetic: DF0000285.4:START321:INDEX169:OBS1
  source 1..80: mol_type = other DNA
agacataacaatccttaacgtgtatgcgcctaacaacagagcgtcaaaatacgtgaggcaaaaactgatagaactgcaag

SEQ ID NO: 243 - DNA, 80 bp, synthetic construct
  misc_feature 1..80: note = Synthetic: DF0000249.4:START2321:INDEX224:OBS1
  source 1..80: mol_type = other DNA
agacatacagaaaacaaatagcaaaatggcagaagtaagtccttccctatcagtaattactttaaatgtaaatggattaa

SEQ ID NO: 244 - DNA, 80 bp, synthetic construct
  misc_feature 1..80: note = Synthetic: DF0000008.4:START2721:INDEX165:OBS1
  source 1..80: mol_type = other DNA
agacccacacatatatggacaattgatttttgacaaaggtgccaaagcaattcagtggggaaaggatagtcttttcaaca

SEQ ID NO: 245 - DNA, 80 bp, synthetic construct
  misc_feature 1..80: note = Synthetic: DF0000285.4:START2721:INDEX24:OBS1
  source 1..80: mol_type = other DNA
agacccacataaatatagtcaactgatctttgacaaaggagcaaaggcaatacaatggagaaaagatagtcttttcaaca

SEQ ID NO: 246 - DNA, 80 bp, synthetic construct
  misc_feature 1..80: note = Synthetic: DF0000249.4:START961:INDEX503:OBS1
  source 1..80: mol_type = other DNA
agacgtggagaaagtcaagaaaacgatgtatgaacaaaatggaaatatcaacaaagagatagaaaacataaaaagaaacc

SEQ ID NO: 247 - DNA, 80 bp, synthetic construct
  misc_feature 1..80: note = Synthetic: DF0000285.4:START241:INDEX405:OBS1
  source 1..80: mol_type = other DNA
agagcagacttcagagcaaggaaagttatcagggataaagaggggcattacataatgataaaggggtcaattctccaaga

SEQ ID NO: 248 - DNA, 80 bp, synthetic construct
  misc_feature 1..80: note = Synthetic: DF0000319.4:START161:INDEX555:OBS1
  source 1..80: mol_type = other DNA
agagcagtgtggtgcggcggcccacctgagagccacacggggcaggggagcccccaccccccagccaagggaggcggtga

SEQ ID NO: 249 - DNA, 80 bp, synthetic construct
  misc_feature 1..80: note = Synthetic: DF0000320.4:START321:INDEX963:OBS1
  source 1..80: mol_type = other DNA
agagctaactatcctaaatatatatgcacccaatacaggagcacccagattcataaagcaagttcttagagacctacaaa

SEQ ID NO: 250 - DNA, 80 bp, synthetic construct
  misc_feature 1..80: note = Synthetic: DF0000279.4:START1761:INDEX491:OBS1
  source 1..80: mol_type = other DNA
taaaataaatatccatgagtccatactgatataaataaataattgaataaataaataaatgggggagaagggacagctct

SEQ ID NO: 251 - DNA, 80 bp, synthetic construct
  misc_feature 1..80: note = Synthetic: DF0000283.4:START801:INDEX840:OBS1
  source 1..80: mol_type = other DNA
agaggaaaatttagcctctggcacctacagctacagcaaacattaaacacagcccaactcctagccagataaacataaaa

SEQ ID NO: 252 - DNA, 80 bp, synthetic construct
  misc_feature 1..80: note = Synthetic: DF0000277.4:START2241:INDEX615:OBS1
  source 1..80: mol_type = other DNA
agaggagcctaaggagacatgacgactaaatgtaatgtggtatcctggatgggatcctggaacagaaaaaggacattagg

SEQ ID NO: 253 - DNA, 80 bp, synthetic construct
  misc_feature 1..80: note = Synthetic: DF0000284.4:START241:INDEX34:OBS1
  source 1..80: mol_type = other DNA
agaggtggccgccataaaagcgggtaagaagaaatcagctaaaattttaacgaattattaaaggccgagtgtgggctagc

SEQ ID NO: 254 - DNA, 80 bp, synthetic construct
  misc_feature 1..80: note = Synthetic: DF0001198.2:START721:INDEX141:OBS1
  source 1..80: mol_type = other DNA
ggcccgagattgggaacgttgtacagatcaagaaaaagtatgaatgagtttgtagggaagcaggttgttcagcagtatct

SEQ ID NO: 255 - DNA, 80 bp, synthetic construct
  misc_feature 1..80: note = Synthetic: DF0000247.4:START721:INDEX751:OBS1
  source 1..80: mol_type = other DNA
agatccatcggcaaagggtggaagccttactggctcaaggtgtttaagcacaacctctgaccaatcattggctgaccact

SEQ ID NO: 256 - DNA, 80 bp, synthetic construct
  misc_feature 1..80: note = Synthetic: DF0001280.2:START161:INDEX9:OBS1
  source 1..80: mol_type = other DNA
ggtcagaatcagcaggctatttagtctgtccaaagtataatctcgagtcccttggagcaagggctttcagcaactatgct

SEQ ID NO: 257 - DNA, 80 bp, synthetic construct
  misc_feature 1..80: note = Synthetic: DF0000245.4:START641:INDEX355:OBS1
  source 1..80: mol_type = other DNA
gcgcatgcgcagggctgtgcgcatgcccaggaaagacctgagaaggccctaagctctcacctctggctgaccttgaggct

SEQ ID NO: 258 - DNA, 80 bp, synthetic construct
  misc_feature 1..80: note = Synthetic: DF0000318.4:START321:INDEX934:OBS1
  source 1..80: mol_type = other DNA
ccctcgggtgcctacgccaccagggccctgggtttcaagcacaaaactgggcggccgtttgggcagacaccgagctagct

SEQ ID NO: 259 - DNA, 80 bp, synthetic construct
  misc_feature 1..80: note = Synthetic: DF0000318.4:START801:INDEX710:OBS1
  source 1..80: mol_type = other DNA
cccagtcaggggcttatagataaaactcccatctccctgggacagagcacctgggggaaggggcggctgtgggcgcagct

SEQ ID NO: 260 - DNA, 80 bp, synthetic construct
  misc_feature 1..80: note = Synthetic: DF0000284.4:START961:INDEX81:OBS1
  source 1..80: mol_type = other DNA
cagtctaccgctgggggaggggcaagagcatggagagagaccccctctgaggcgcaggcgcgcagggaaagccgaaagct

SEQ ID NO: 261 - DNA, 80 bp, synthetic construct
  misc_feature 1..80: note = Synthetic: DF0000284.4:START1:INDEX84:OBS1
  source 1..80: mol_type = other DNA
aggaacttccactttcagttccgcttccgcttaggatgtagaaagccgcaagagaacgtcgctcccaccctaacaacgag

SEQ ID NO: 262 - DNA, 80 bp, synthetic construct
  misc_feature 1..80: note = Synthetic: DF0001198.2:START321:INDEX114:OBS1
  source 1..80: mol_type = other DNA
gagagtgcctgagaaataaattctcgggcctctttcattttctatttctgttaataaccttccagctaaatgtgattcct

SEQ ID NO: 263 - DNA, 80 bp, synthetic construct
  misc_feature 1..80: note = Synthetic: DF0000245.4:START2081:INDEX489:OBS1
  source 1..80: mol_type = other DNA
gcaccggtaaaggtaactacataggtaaatataaaagacagtataaatgtatttttagtttgtaactctttttttctcct

SEQ ID NO: 264 - DNA, 80 bp, synthetic construct
  misc_feature 1..80: note = Synthetic: DF0000320.4:START1921:INDEX669:OBS1
  source 1..80: mol_type = other DNA
atcatactgaatgggcaaaagctggaagcattccctttgaaaaccggcacaagacaaggatgccctctctcaccactcct

SEQ ID NO: 265 - DNA, 80 bp, synthetic construct
  misc_feature 1..80: note = Synthetic: DF0000275.4:START401:INDEX382:OBS1
  source 1..80: mol_type = other DNA
aggagttgaaaacttatgtccacacaaaaacctgcacacggatgtttatagcagctttattcataattgccaaaacttgg

SEQ ID NO: 266 - DNA, 80 bp, synthetic construct
  misc_feature 1..80: note = Synthetic: DF0001333.2:START401:INDEX677:OBS1
  source 1..80: mol_type = other DNA
ccttcctgtatctctccgcctcatcgactctccatctcttttcaaatctcatctaaaaatacatcttttctcccttgcct

SEQ ID NO: 267 - DNA, 80 bp, synthetic construct
  misc_feature 1..80: note = Synthetic: DF0000248.4:START401:INDEX758:OBS1
  source 1..80: mol_type = other DNA
aggcgagtgcggccgagaggtcgggggctcccttcctccacccagcccccactcgtagggcggaggctctaccccgggcg

SEQ ID NO: 268 - DNA, 80 bp, synthetic construct
  misc_feature 1..80: note = Synthetic: DF0000282.4:START561:INDEX916:OBS1
  source 1..80: mol_type = other DNA
agggaaatacccaactccagcccactctagccatcctgtcccacctaaggggggaggagaaactgagaagcacttgtgaa

SEQ ID NO: 269 - DNA, 80 bp, synthetic construct
  misc_feature 1..80: note = Synthetic: DF0000277.4:START2001:INDEX951:OBS1
  source 1..80: mol_type = other DNA
tcaaggtcaacatcaacagtgataagtcatgttgatagtatgtacccttgatatgatgtgatgagaatggcactttacct

SEQ ID NO: 270 - DNA, 80 bp, synthetic construct
  misc_feature 1..80: note = Synthetic: DF0000277.4:START801:INDEX41:OBS1
  source 1..80: mol_type = other DNA
gtatgatactgtaatggtggatacatgacactatgcatttgtcaaaacccatagaactttacagcacaaagagtgaacct

SEQ ID NO: 271 - DNA, 80 bp, synthetic construct
  misc_feature 1..80: note = Synthetic: DF0000278.4:START321:INDEX606:OBS1
  source 1..80: mol_type = other DNA
aggttgatctgaaaaaaccaccgccagaaagagaaagtccaccctaagtatgaaaatactaaaaaagtgtccgggtagat

SEQ ID NO: 272 - DNA, 80 bp, synthetic construct
  misc_feature 1..80: note = Synthetic: DF0001280.2:START1:INDEX214:OBS1
  source 1..80: mol_type = other DNA
tgaaaatacatcacttatattttaaaatctctgcattggctccccgtaaaactccgtattgattttaaagttttgttact

SEQ ID NO: 273 - DNA, 80 bp, synthetic construct
  misc_feature 1..80: note = Synthetic: DF0000010.4:START1761:INDEX228:OBS1
  source 1..80: mol_type = other DNA
agtaatggattataacccattgaataaaataagaatccatgagtccatactgatataaataaataaataaataaatgggg

SEQ ID NO: 274 - DNA, 80 bp, synthetic construct
  misc_feature 1..80: note = Synthetic: DF0000279.4:START1041:INDEX159:OBS1
  source 1..80: mol_type = other DNA
ctaacctaagtaactttggaaaacagtattttgactgaatactgtaaggctaaagacaaaaagaactgtacacaaatact

SEQ ID NO: 275 - DNA, 80 bp, synthetic construct
  misc_feature 1..80: note = Synthetic: DF0000634.4:START161:INDEX6:OBS1
  source 1..80: mol_type = other DNA
agtcccagctacacgggaggctgaggcaggagaatggcgtgaacccgggaggcggagcttgcagtgagtcgagatcgcgc

SEQ ID NO: 276 - DNA, 80 bp, synthetic construct
  misc_feature 1..80: note = Synthetic: DF0001240.2:START161:INDEX780:OBS1
  source 1..80: mol_type = other DNA
agtcccagctactcgggaggctgaggcaggagaatggcgtgaaccccggggggcggagcctgcagtgagccgagatcgcg

SEQ ID NO: 277 - DNA, 80 bp, synthetic construct
  misc_feature 1..80: note = Synthetic: DF0000056.4:START161:INDEX952:OBS1
  source 1..80: mol_type = other DNA
agtcccagctactggggaggctgaggcaggagaatggcgtgaacccgggaagcggagcttgcagtgagccgagattgcgc

SEQ ID NO: 278 - DNA, 80 bp, synthetic construct
  misc_feature 1..80: note = Synthetic: DF0000320.4:START1:INDEX444:OBS1
  source 1..80: mol_type = other DNA
atgacaggatcaaattcacacataacaatattaaccttaaatgtaaatgggctaaatgccccaattaaaagacacagact

SEQ ID NO: 279 - DNA, 80 bp, synthetic construct
  misc_feature 1..80: note = Synthetic: DF0000248.4:START2961:INDEX392:OBS1
  source 1..80: mol_type = other DNA
agtgaaaaaaatcattaaaggaattaaaatgttacactagaaaatattcacttaatgcaaaagaaagcagtaaaggagga

SEQ ID NO: 280 - DNA, 80 bp, synthetic construct
  misc_feature 1..80: note = Synthetic: DF0000245.4:START881:INDEX137:OBS1
  source 1..80: mol_type = other DNA
taagctaaccgagcagagacttcagtggccacacacgacaaagaatacagactttacagaattagttcagaaaagtcact

SEQ ID NO: 281 - DNA, 80 bp, synthetic construct
  misc_feature 1..80: note = Synthetic: DF0000282.4:START2241:INDEX556:OBS1
  source 1..80: mol_type = other DNA
taggaacaaagaacaagggcaacaaatagaaaacagtaacaaatatggtagatattaatccaactatatcaataatcact

SEQ ID NO: 282 - DNA, 80 bp, synthetic construct
  misc_feature 1..80: note = Synthetic: DF0000278.4:START2321:INDEX679:OBS1
  source 1..80: mol_type = other DNA
agtgattcagaaaggctgaaaataaagggatggaaaaagatataccaggcaaatggaaacaaaaaagaagggttgcaata

SEQ ID NO: 283 - DNA, 80 bp, synthetic construct
  misc_feature 1..80: note = Synthetic: DF0001067.4:START161:INDEX778:OBS1
  source 1..80: mol_type = other DNA
agtgcctgggattgcaggcgcgcgccgccacgcctgactggtttttgtatttttggtggagacggggtctcgccgtgttg

SEQ ID NO: 284 - DNA, 80 bp, synthetic construct
  misc_feature 1..80: note = Synthetic: DF0000283.4:START721:INDEX703:OBS1
  source 1..80: mol_type = other DNA
gctgcaagacacagactctatttaagaaggagtacctagggaaacccaaagacaaaaggggagacaaaaacaaggacact

SEQ ID NO: 285 - DNA, 80 bp, synthetic construct
  misc_feature 1..80: note = Synthetic: DF0000249.4:START2081:INDEX110:OBS1
  source 1..80: mol_type = other DNA
ggacggagctgtaaaggagcagagtttttgtatgtaattgaagttaagttgatataaattcaaaatagaatgttataact

SEQ ID NO: 286 - DNA, 80 bp, synthetic construct
  misc_feature 1..80: note = Synthetic: DF0000320.4:START961:INDEX584:OBS1
  source 1..80: mol_type = other DNA
ttaaaagaactagagaagcaagagcaaacaaattcaaaagctagcagaagacaagaaataactaagatcagagcagaact

SEQ ID NO: 287 - DNA, 80 bp, synthetic construct
  misc_feature 1..80: note = Synthetic: DF0000282.4:START1121:INDEX334:OBS1
  source 1..80: mol_type = other DNA
atatgtcaatagaaacttccaaaactgaaaagcaaagagaaaaaagactgaaaaaaaacagaacagaatatccaagaact

SEQ ID NO: 288 - DNA, 80 bp, synthetic construct
  misc_feature 1..80: note = Synthetic: DF0000318.4:START1648:INDEX379:OBS1
  source 1..80: mol_type = other DNA
gaacttcgtgaagcatacacaagtatcaatagccgaatcgatcaagcggaagaaaggatatcagagattgaagatcaact

SEQ ID NO: 289 - DNA, 80 bp, synthetic construct
  misc_feature 1..80: note = Synthetic: DF0000249.4:START1361:INDEX35:OBS1
  source 1..80: mol_type = other DNA
ataaaaatccaagaagctcaacgaactccaagtaggatgaactcaaagagacccacaccgagacacattataatcaaact

SEQ ID NO: 290 - DNA, 80 bp, synthetic construct
  misc_feature 1..80: note = Synthetic: DF0000284.4:START801:INDEX883:OBS1
  source 1..80: mol_type = other DNA
agtttggctgccatggagagaggggcaggaacgctgagaaagccccacccccgaggcccaggaacacagggcctgcctaa

SEQ ID NO: 291 - DNA, 80 bp, synthetic construct
  misc_feature 1..80: note = Synthetic: DF0001198.2:START81:INDEX865:OBS1
  source 1..80: mol_type = other DNA
agatctaaaaaaaggtatccacactatctccaatgcaatagatgaagactgtgtgacaggagaaaattttattaaactat

SEQ ID NO: 292 - DNA, 80 bp, synthetic construct
  misc_feature 1..80: note = Synthetic: DF0000283.4:START961:INDEX890:OBS1
  source 1..80: mol_type = other DNA
tgctaaaaggcaagaaaaaaaaacacagtctgaagagacaaagcaagcatcagaaccagactcagatatgacaaagatat

SEQ ID NO: 293 - DNA, 80 bp, synthetic construct
  misc_feature 1..80: note = Synthetic: DF0000246.4:START1681:INDEX406:OBS1
  source 1..80: mol_type = other DNA
gtacaggggaacaacgatacgattaacggctgacttctcatcagaaacaatggaggccagaagacagtggaatgacatat

SEQ ID NO: 294 - DNA, 80 bp, synthetic construct
  misc_feature 1..80: note = Synthetic: DF0000249.4:START1:INDEX384:OBS1
  source 1..80: mol_type = other DNA
ataaaaaaaataatgaggagaggattctgggaagatggcggagtaggaagcaccaggaatctgtctccccacctagacaa

SEQ ID NO: 295 - DNA, 80 bp, synthetic construct
  misc_feature 1..80: note = Synthetic: DF0000008.4:START1121:INDEX685:OBS1
  source 1..80: mol_type = other DNA
ataaacctctagcaagactgatcaagaaaaaaagagagaagacacaaattaccaatatcaggaatgaaaaaggagacatc

SEQ ID NO: 296 - DNA, 80 bp, synthetic construct
  misc_feature 1..80: note = Synthetic: DF0000285.4:START1121:INDEX857:OBS1
  source 1..80: mol_type = other DNA
ataagcctctagccaggctaactaagaaaaaaagagagaagacacaaattactaatatcagaaatgaaagaggggacatc

SEQ ID NO: 297 - DNA, 80 bp, synthetic construct
  misc_feature 1..80: note = Synthetic: DF0000245.4:START1601:INDEX605:OBS1
  source 1..80: mol_type = other DNA
ataatggccgaaaacttcccaaatttgatgaaaaacataaatctacacatccaagaagctcaacgaactccaagtaggat

SEQ ID NO: 298 - DNA, 80 bp, synthetic construct
  misc_feature 1..80: note = Synthetic: DF0000279.4:START1921:INDEX138:OBS1
  source 1..80: mol_type = other DNA
ataattgttgcaggcaagatccaccgatggatgctaaaattagtgggcgaaagtttgaggagaaacaggatatttgcata

SEQ ID NO: 299 - DNA, 80 bp, synthetic construct
  misc_feature 1..80: note = Synthetic: DF0000279.4:START961:INDEX85:OBS1
  source 1..80: mol_type = other DNA
atacaaacagaaacaaatgaacctaactgtattacaaatgaataacataaccacactgaaggggatggggaagaaaagaa

SEQ ID NO: 300 - DNA, 80 bp, synthetic construct
  misc_feature 1..80: note = Synthetic: DF0000279.4:START401:INDEX301:OBS1
  source 1..80: mol_type = other DNA
atacacctccaacatgtacaaaataacatatgcacaaggttattcattgcagcattgtttgtaattgcaaaatattggaa

SEQ ID NO: 301 - DNA, 80 bp, synthetic construct
  misc_feature 1..80: note = Synthetic: DF0000281.4:START881:INDEX254:OBS1
  source 1..80: mol_type = other DNA
taattaaaaaacaaaattaaattaaaaaaagcaatccctaaaaatcgaaaacaaaatgaaacaaatgaacctaactgtat

SEQ ID NO: 302 - DNA, 80 bp, synthetic construct
  misc_feature 1..80: note = Synthetic: DF0000320.4:START1121:INDEX899:OBS1
  source 1..80: mol_type = other DNA
atagaccgctagccagactaataaagaagaaaagagagaagaatcaaatagacacaataaaaaatgataaaggggatatc

SEQ ID NO: 303 - DNA, 80 bp, synthetic construct
  misc_feature 1..80: note = Synthetic: DF0000248.4:START1041:INDEX572:OBS1
  source 1..80: mol_type = other DNA
atagagcaatcagccggcaattagtggagcctaacagctgggtgtgataccaacagaggcagacagcttaacagagagat

SEQ ID NO: 304 - DNA, 80 bp, synthetic construct
  misc_feature 1..80: note = Synthetic: DF0000248.4:START3041:INDEX28:OBS1
  source 1..80: mol_type = other DNA
atagaggaacaaaaaagacatgagacatatagaaaacaaaaagtaaaatggcagacgtaaatccaactatatcaataata

SEQ ID NO: 305 - DNA, 80 bp, synthetic construct
  misc_feature 1..80: note = Synthetic: DF0000248.4:START2801:INDEX439:OBS1
  source 1..80: mol_type = other DNA
atagcacaaaaagggggaaaagggaatagagctatataggagtaacgtttctatatctcactggaattaagttagtataa

SEQ ID NO: 306 - DNA, 80 bp, synthetic construct
  misc_feature 1..80: note = Synthetic: DF0000010.4:START721:INDEX289:OBS1
  source 1..80: mol_type = other DNA
gttgccaggggttgggagatgggaagaggggatgactgcaaaggagaagcacaggggattttttagggtgatgaaactat

SEQ ID NO: 307 - DNA, 80 bp, synthetic construct
  misc_feature 1..80: note = Synthetic: DF0000284.4:START1457:INDEX150:OBS1
  source 1..80: mol_type = other DNA
tatgttaaaggatctagtggaaaaaaggtggacaacatgcaagaacagatgggaaatttcagcagagagatggaaactat

SEQ ID NO: 308 - DNA, 80 bp, synthetic construct
  misc_feature 1..80: note = Synthetic: DF0000277.4:START1761:INDEX885:OBS1
  source 1..80: mol_type = other DNA
atataaataaatgattgaataaataaataaatgggggagaagagacaaatctcccgtgcagaagaattccaaataattta

SEQ ID NO: 309 - DNA, 80 bp, synthetic construct
  misc_feature 1..80: note = Synthetic: DF0000285.4:START1281:INDEX239:OBS1
  source 1..80: mol_type = other DNA
tgaaatggaccaattccttgaaagacacaatctgccaaaactcacacaagaagaaatagacaatctgaataggcctatat

SEQ ID NO: 310 - DNA, 80 bp, synthetic construct
  misc_feature 1..80: note = Synthetic: DF0000008.4:START1281:INDEX305:OBS1
  source 1..80: mol_type = other DNA
tgaaatggacaaattccttgaaaaacacaaattaccaaaactgacacaagaagaaatagaaaatctgaatagccctatat

SEQ ID NO: 311 - DNA, 80 bp, synthetic construct
  misc_feature 1..80: note = Synthetic: DF0000010.4:START1361:INDEX317:OBS1
  source 1..80: mol_type = other DNA
atatatatgaatatacagacggacagatatagaaatagatatagatatatatgtgtatgtgtatatgtgtatgtatatac

SEQ ID NO: 312 - DNA, 80 bp, synthetic construct
  misc_feature 1..80: note = Synthetic: DF0000281.4:START1041:INDEX393:OBS1
  source 1..80: mol_type = other DNA
gtgggatatattctaaggacaaaaagaaccgcaaagaaatcttaaactacattcagtagtcttattgttagtagtaatat

SEQ ID NO: 313 - DNA, 80 bp, synthetic construct
  misc_feature 1..80: note = Synthetic: DF0000008.4:START1521:INDEX535:OBS1
  source 1..80: mol_type = other DNA
ctcattttatgaggccagcataaccctgataccaaaaccagacaaagacattacaagaaaagaaaattacagaccaatat

SEQ ID NO: 314 - DNA, 80 bp, synthetic construct
  misc_feature 1..80: note = Synthetic: DF0000285.4:START1521:INDEX539:OBS1
  source 1..80: mol_type = other DNA
ctcattctatgaggccagcattaccctaataccaaaaccagacaaagacattacaagaaaagaaaactacagaccaatat

SEQ ID NO: 315 - DNA, 80 bp, synthetic construct
  misc_feature 1..80: note = Synthetic: DF0000248.4:START2881:INDEX310:OBS1
  source 1..80: mol_type = other DNA
atctgaagtagattctgataagttaagatgtatatggtaagccctagagcaaccactaagaaaataactcaaaaaaatat

SEQ ID NO: 316 - DNA, 80 bp, synthetic construct
  misc_feature 1..80: note = Synthetic: DF0000250.4:START481:INDEX407:OBS1
  source 1..80: mol_type = other DNA
atcaacaaggaaatagaagacttgaacaacactataaaccaactagacctaacagacatctatagaacactccacccaac

SEQ ID NO: 317 - DNA, 80 bp, synthetic construct
  misc_feature 1..80: note = Synthetic: DF0000320.4:START561:INDEX953:OBS1
  source 1..80: mol_type = other DNA
atcaacagaatatacattcttctcagcgccacatcgcacttattctaaaattgaccacataattggaagtaaaacactcc

SEQ ID NO: 318 - DNA, 80 bp, synthetic construct
  misc_feature 1..80: note = Synthetic: DF0000281.4:START961:INDEX860:OBS1
  source 1..80: mol_type = other DNA
atcaagttggtggcataaccacacagagaagaattatttcaagtgactttaaaacacagtaatttgactgtacatcccta

SEQ ID NO: 319 - DNA, 80 bp, synthetic construct
  misc_feature 1..80: note = Synthetic: DF0000320.4:START161:INDEX346:OBS1
  source 1..80: mol_type = other DNA
tcaaaataaagggatggaggaaaatttaccaagcaaatggaaagcaaaaaaaagcaggggttgcaatcctagtctctgat

SEQ ID NO: 320 - DNA, 80 bp, synthetic construct
  misc_feature 1..80: note = Synthetic: DF0000281.4:START2241:INDEX498:OBS1
  source 1..80: mol_type = other DNA
atcagccaaatccagaatgtgggaaattctacaggacaaatgacccggtttcttcaacaaataaatggcgagaaaaaaaa

SEQ ID NO: 321 - DNA, 80 bp, synthetic construct
  misc_feature 1..80: note = Synthetic: DF0000285.4:START481:INDEX694:OBS1
  source 1..80: mol_type = other DNA
atcagtaaggacatagttgaactaaacagcaccatcaatcaactggatataattgacatctatagaatacttcatccaac

SEQ ID NO: 322 - DNA, 80 bp, synthetic construct
  misc_feature 1..80: note = Synthetic: DF0000008.4:START481:INDEX259:OBS1
  source 1..80: mol_type = other DNA
atcagtaaggatatagaagatttgaacaacactatcaaccaacttgacctaattgacatttatagaacactacacccaac

SEQ ID NO: 323 - DNA, 80 bp, synthetic construct
  misc_feature 1..80: note = Synthetic: DF0000278.4:START721:INDEX437:OBS1
  source 1..80: mol_type = other DNA
atcataaaaatgaacaagaatagaataaatccatacaaagctactacaaaaaaaaaacatcagaaaatgagaatcaaaac

SEQ ID NO: 324 - DNA, 80 bp, synthetic construct
  misc_feature 1..80: note = Synthetic: DF0000010.4:START1681:INDEX680:OBS1
  source 1..80: mol_type = other DNA
caaaaggacacaggagccagcttgaaggggctcccactggccaaatctgggacaatttgagcatcaaaataaataatgat

SEQ ID NO: 325 - DNA, 80 bp, synthetic construct
  misc_feature 1..80: note = Synthetic: DF0000041.4:START161:INDEX237:OBS1
  source 1..80: mol_type = other DNA
atcccagctactcgggaggctgaggcagagaattgcttgaacccgggaggcggaggttgcagtgagccgagatcgcgcca

SEQ ID NO: 326 - DNA, 80 bp, synthetic construct
  misc_feature 1..80: note = Synthetic: DF0000010.4:START881:INDEX368:OBS1
  source 1..80: mol_type = other DNA
aaaaccacagaaatatacagcacaaagagtgaactttaatgtatgcaaattttaaaaaatcaattaggaggtcgggggat

SEQ ID NO: 327 - DNA, 80 bp, synthetic construct
  misc_feature 1..80: note = Synthetic: DF0000247.4:START481:INDEX61:OBS1
  source 1..80: mol_type = other DNA
atccggggaatgagacagccatagagggccttgataagctcccacatatccctggcggtctggaaggctgcgcgcacgcg

SEQ ID NO: 328 - DNA, 80 bp, synthetic construct
  misc_feature 1..80: note = Synthetic: DF0000010.4:START2401:INDEX626:OBS1
  source 1..80: mol_type = other DNA
atcctggattggatcctggaccagaaaaaaaatttgctataaaggacattattgggacaattggcgaaatttgaataagg

SEQ ID NO: 329 - DNA, 80 bp, synthetic construct
  misc_feature 1..80: note = Synthetic: DF0000319.4:START81:INDEX866:OBS1
  source 1..80: mol_type = other DNA
atccttcaccggcaaccaaggtatccaggttctctcatcagaactgactaggaggctggcgtgacccacggagagaagga

SEQ ID NO: 330 - DNA, 80 bp, synthetic construct
  misc_feature 1..80: note = Synthetic: DF0000284.4:START481:INDEX68:OBS1
  source 1..80: mol_type = other DNA
atcggctgccgctgggggacaggcacgaagcccacctcacattcccagaaccttctctcctaaagcaaaagccttaagcc

SEQ ID NO: 331 - DNA, 80 bp, synthetic construct
  misc_feature 1..80: note = Synthetic: DF0000281.4:START2481:INDEX515:OBS1
  source 1..80: mol_type = other DNA
ttaaggaattattgttaattttgttaggtgtgataatggtattgtggttatgttaaaaaaagtccttatcttttagagat

SEQ ID NO: 332 - DNA, 80 bp, synthetic construct
  misc_feature 1..80: note = Synthetic: DF0000278.4:START1361:INDEX745:OBS1
  source 1..80: mol_type = other DNA
cccaccgagtacctgggaaaattgacccggaacgatcaactccgagacatatcctagtaaaactattagactttaaagat

SEQ ID NO: 333 - DNA, 80 bp, synthetic construct
  misc_feature 1..80: note = Synthetic: DF0000318.4:START1121:INDEX676:OBS1
  source 1..80: mol_type = other DNA
atctttgctgttctgcagcctccgctggtgatacccaggcaaacagggtctggagtggacctccagcaaactccagcaga

SEQ ID NO: 334 - DNA, 80 bp, synthetic construct
  misc_feature 1..80: note = Synthetic: DF0000245.4:START1361:INDEX156:OBS1
  source 1..80: mol_type = other DNA
atgaaaaattcactagaggggctcaacagcagatttgagcaggcagaagaaagaatcagcgaacttgaagataggtcaat

SEQ ID NO: 335 - DNA, 80 bp, synthetic construct
  misc_feature 1..80: note = Synthetic: DF0000279.4:START81:INDEX724:OBS1
  source 1..80: mol_type = other DNA
atgaacagacaattcacaaaaagaaataaaaatggcccttaaacatatgaaaagatgttcaacctcactcataataagag

SEQ ID NO: 336 - DNA, 80 bp, synthetic construct
  misc_feature 1..80: note = Synthetic: DF0001333.2:START481:INDEX620:OBS1
  source 1..80: mol_type = other DNA
atgcctcttaatttctctctccctctgttattggccttatgactgaatgctttaatttattcaccatacaatgtctttac

SEQ ID NO: 337 - DNA, 80 bp, synthetic construct
  misc_feature 1..80: note = Synthetic: DF0001333.2:START241:INDEX179:OBS1
  source 1..80: mol_type = other DNA
atggacttgctccagcctacctcacggaccttgtctctctctgctcccctccccgctccctccgctcgtctagcaccggc

SEQ ID NO: 338 - DNA, 80 bp, synthetic construct
  misc_feature 1..80: note = Synthetic: DF0000277.4:START1521:INDEX913:OBS1
  source 1..80: mol_type = other DNA
atggctgattctaggactggggcaggaaatatacaagatgagcctggagcatcttgtagtgccagaaagtaaggaagtgc

SEQ ID NO: 339 - DNA, 80 bp, synthetic construct
  misc_feature 1..80: note = Synthetic: DF0000319.4:START481:INDEX896:OBS1
  source 1..80: mol_type = other DNA
gggaggggcagcagccagcactgggactcgcaactgcctaacacgctaagctccctgggcgggggaagggcggcacccat

SEQ ID NO: 340 - DNA, 80 bp, synthetic construct
  misc_feature 1..80: note = Synthetic: DF0000248.4:START2641:INDEX648:OBS1
  source 1..80: mol_type = other DNA
atggtaaataagaaggttaatataacaaactctataaatatatacttgctctcctttcttctctcagcttctttaaaaga

SEQ ID NO: 341 - DNA, 80 bp, synthetic construct
  misc_feature 1..80: note = Synthetic: DF0000279.4:START1441:INDEX833:OBS1
  source 1..80: mol_type = other DNA
cgctgagagggcctagaagcaatgacaccccagtagcaatgagcacacctagcgcccagatcttggtttctaaataccat

SEQ ID NO: 342 - DNA, 80 bp, synthetic construct
  misc_feature 1..80: note = Synthetic: DF0000276.4:START881:INDEX641:OBS1
  source 1..80: mol_type = other DNA
atgtaaactatggactttagttaataataatgtatcaatattggttcatcaattgtaacaaatgtaccacactaatgcaa

SEQ ID NO: 343 - DNA, 80 bp, synthetic construct
  misc_feature 1..80: note = Synthetic: DF0000008.4:START1601:INDEX340:OBS1
  source 1..80: mol_type = other DNA
ccctcatgaacatagatgcaaaaatcctaaacaaaatattagcaaatcgaatccagcaatatataaaaaggataatacat

SEQ ID NO: 344 - DNA, 80 bp, synthetic construct
  misc_feature 1..80: note = Synthetic: DF0000359.4:START401:INDEX96:OBS1
  source 1..80: mol_type = other DNA
gtaagctccatgagggcagggacttttgtctgttttgttcactgctgtatccccagcgcctagaacagtgcctggcacat

SEQ ID NO: 345 - DNA, 80 bp, synthetic construct
  misc_feature 1..80: note = Synthetic: DF0000283.4:START1118:INDEX590:OBS1
  source 1..80: mol_type = other DNA
caagaacagatgggtaatgtaagcagagagatggaaactctaagaaaagaatcaaaaggaaatgctagaaataaaaacat

SEQ ID NO: 346 - DNA, 80 bp, synthetic construct
  misc_feature 1..80: note = Synthetic: DF0000278.4:START2241:INDEX684:OBS1
  source 1..80: mol_type = other DNA
attaaaagaaaaagattttcaaattggataaaaaagcaagacccaactatatgctgtatacaagagacacacctaaaaaa

SEQ ID NO: 347 - DNA, 80 bp, synthetic construct
  misc_feature 1..80: note = Synthetic: DF0000320.4:START481:INDEX154:OBS1
  source 1..80: mol_type = other DNA
attaacaaggatattcaggacttgaactcagctctggaccaagcggacctaatagacatctacagaactctccaccccaa

SEQ ID NO: 348 - DNA, 80 bp, synthetic construct
  misc_feature 1..80: note = Synthetic: DF0001198.2:START801:INDEX760:OBS1
  source 1..80: mol_type = other DNA
attacccatcctgaactatggggataatgtatattcaaatgcaactggggtagaactgcagaggttagaagtattatata

SEQ ID NO: 349 - DNA, 80 bp, synthetic construct
  misc_feature 1..80: note = Synthetic: DF0000010.4:START2161:INDEX427:OBS1
  source 1..80: mol_type = other DNA
cctcctgatatgatgcactgagaaggacacagcatcacttctgtggtattcctgccaaaaatgcataacctgaatctaat

SEQ ID NO: 350 - DNA, 80 bp, synthetic construct
  misc_feature 1..80: note = Synthetic: DF0000320.4:START2001:INDEX7:OBS1
  source 1..80: mol_type = other DNA
attcaacatagtattggaagttctggccagggcaatcaggcaagagaaagaaataaagggtattcaaataggaagagagg

SEQ ID NO: 351 - DNA, 80 bp, synthetic construct
  misc_feature 1..80: note = Synthetic: DF0000008.4:START2001:INDEX529:OBS1
  source 1..80: mol_type = other DNA
attcaacattgtactggaggtcctagccagtgcaataaggcaagaaaaagaaataaaaggcataaagattggaaaggaag

SEQ ID NO: 352 - DNA, 80 bp, synthetic construct
  misc_feature 1..80: note = Synthetic: DF0000360.4:START387:INDEX483:OBS1
  source 1..80: mol_type = other DNA
ttcaccgctgtatccccagcgcctagcacagagcctggcacacagtaggcgctcagtaaatatttgttgaatgaatgaat

SEQ ID NO: 353 - DNA, 80 bp, synthetic construct
  misc_feature 1..80: note = Synthetic: DF0000359.4:START321:INDEX451:OBS1
  source 1..80: mol_type = other DNA
tccatagcacttatcaccatctgacatactatatattttacttatttatttgtttattgtctgtctccccccactagaat

SEQ ID NO: 354 - DNA, 80 bp, synthetic construct
  misc_feature 1..80: note = Synthetic: DF0000281.4:START1281:INDEX377:OBS1
  source 1..80: mol_type = other DNA
attggaaatatcagtatgaactcatgatatattttctctttaaaaaatacgtatttcctagctctgtccactgaaaaggc

SEQ ID NO: 355 - DNA, 80 bp, synthetic construct
  misc_feature 1..80: note = Synthetic: DF0000320.4:START1841:INDEX659:OBS1
  source 1..80: mol_type = other DNA
taaaaactctcaataaactaggtattgatggaacgtatctcaaaataataagagctatttatgacaaacccacagccaat

SEQ ID NO: 356 - DNA, 80 bp, synthetic construct
  misc_feature 1..80: note = Synthetic: DF0000279.4:START2401:INDEX331:OBS1
  source 1..80: mol_type = other DNA
gaacagaaaaaaggacattagtggaaaaactggtgaaattcgaataaggtctgtagtttagttaatagtattgtaccaat

SEQ ID NO: 357 - DNA, 80 bp, synthetic construct
  misc_feature 1..80: note = Synthetic: DF0000245.4:START81:INDEX269:OBS1
  source 1..80: mol_type = other DNA
attgtcagaatcaactttttcagaactctggaaattaaccaaaggcttgcagcaatccggggagcgtttattcaagaaaa

SEQ ID NO: 358 - DNA, 80 bp, synthetic construct
  misc_feature 1..80: note = Synthetic: DF0000245.4:START401:INDEX394:OBS1
  source 1..80: mol_type = other DNA
gggcttgtctttatttgacctgactcggagctcgcccagtgcgaaaagccttttccccgggggcatttgtcgaaaacaat

SEQ ID NO: 359 - DNA, 80 bp, synthetic construct
  misc_feature 1..80: note = Synthetic: DF0000278.4:START801:INDEX55:OBS1
  source 1..80: mol_type = other DNA
atttcagctgatgaaaattcccccccaaaaaaaaacaaaaaacaaccatgaagcagaagaaaactgtaacacaacactcc

SEQ ID NO: 360 - DNA, 80 bp, synthetic construct
  misc_feature 1..80: note = Synthetic: DF0000250.4:START961:INDEX472:OBS1
  source 1..80: mol_type = other DNA
cttaagaaactagaaaaagaagagcaaactaaacccaaagcaagcagaaggaaggaaataataaagattagagcggaaat

SEQ ID NO: 361 - DNA, 80 bp, synthetic construct
  misc_feature 1..80: note = Synthetic: DF0000246.4:START1121:INDEX737:OBS1
  source 1..80: mol_type = other DNA
ttaaaggaaaatatgtttaaagaattaaaggaaaatatgatgacaatgaataaacaaatagggaatctcaacagagaaat

SEQ ID NO: 362 - DNA, 80 bp, synthetic construct
  misc_feature 1..80: note = Synthetic: DF0000320.4:START2641:INDEX73:OBS1
  source 1..80: mol_type = other DNA
gctacagtaaccaaaacagcatggtactggtaccaaaacagatatatagaccaatggaacagaacagaggcctcagaaat

SEQ ID NO: 363 - DNA, 80 bp, synthetic construct
  misc_feature 1..80: note = Synthetic: DF0000285.4:START961:INDEX376:OBS1
  source 1..80: mol_type = other DNA
cttaggaaactagaaaaagaagagcaaattaaatccaaagtaagcagaagaaaagaaataataaaaattagagcagaaat

SEQ ID NO: 364 - DNA, 80 bp, synthetic construct
  misc_feature 1..80: note = Synthetic: DF0000008.4:START961:INDEX102:OBS1
  source 1..80: mol_type = other DNA
cttaagaagctagaaaaagaagagcaaattaaacccaaagaaagtagaaggaaggaaataataaagataagagcagaaat

SEQ ID NO: 365 - DNA, 80 bp, synthetic construct
  misc_feature 1..80: note = Synthetic: DF0000285.4:START2641:INDEX793:OBS1
  source 1..80: mol_type = other DNA
gctacagtaatcaagacagtgtggtattggcgaaagaatagacaaatagatcaatggaacagaatagagagcccagaaat

SEQ ID NO: 366 - DNA, 80 bp, synthetic construct
  misc_feature 1..80: note = Synthetic: DF0001198.2:START241:INDEX630:OBS1
  source 1..80: mol_type = other DNA
tggtttgcaaattacttgaggaatcgtatacagaagatttccaaaagcagtgttaatttagatacaagggcattacaaat

SEQ ID NO: 367 - DNA, 80 bp, synthetic construct
  misc_feature 1..80: note = Synthetic: DF0000278.4:START481:INDEX906:OBS1
  source 1..80: mol_type = other DNA
gagagaaaaggcaaaaaggaagggagaagcgccctttggaaattgggtggtgaagaggaaaagaagcaaaaggggaaaat

SEQ ID NO: 368 - DNA, 80 bp, synthetic construct
  misc_feature 1..80: note = Synthetic: DF0000282.4:START721:INDEX221:OBS1
  source 1..80: mol_type = other DNA
ccttaccaccacattactaaaggcctatttacagcagttccttttacccagtacatcatgtccggctatcaaaaaaaaat

SEQ ID NO: 369 - DNA, 80 bp, synthetic construct
  misc_feature 1..80: note = Synthetic: DF0000250.4:START2321:INDEX290:OBS1
  source 1..80: mol_type = other DNA
caaaagaagtgcaagacttgtacactgaaaactacaaaacattgttgaaagaaattaaagaagacctaaataaatggaaa

SEQ ID NO: 370 - DNA, 80 bp, synthetic construct
  misc_feature 1..80: note = Synthetic: DF0000008.4:START2321:INDEX210:OBS1
  source 1..80: mol_type = other DNA
caaaaaatgtgcaagacctatacactgaaaactacaaaacattgctgagagaaattaaagaagacctaaataaatggaga

SEQ ID NO: 371 - DNA, 80 bp, synthetic construct
  misc_feature 1..80: note = Synthetic: DF0000285.4:START2321:INDEX292:OBS1
  source 1..80: mol_type = other DNA
caaaatatgtacaagatctatatgaggaaaactacaaaactctgatgaaagaaatcaaagaagaactaaataaatggaga

SEQ ID NO: 372 - DNA, 80 bp, synthetic construct
  misc_feature 1..80: note = Synthetic: DF0000280.4:START2161:INDEX71:OBS1
  source 1..80: mol_type = other DNA
caaaatccagactgtgggaaactctacaggacaaacgacccggtttcttcaacaaataaattgcaagaaaaaaaagatgg

SEQ ID NO: 373 - DNA, 80 bp, synthetic construct
  misc_feature 1..80: note = Synthetic: DF0000280.4:START2321:INDEX490:OBS1
  source 1..80: mol_type = other DNA
caaacaaacaaactataaaaaaacatttatgagacaatcggggaaatttgaacactgactggatatttgatgatattaag

SEQ ID NO: 374 - DNA, 80 bp, synthetic construct
  misc_feature 1..80: note = Synthetic: DF0001071.4:START81:INDEX825:OBS1
  source 1..80: mol_type = other DNA
caaagctggacggtactgctgccatctcggctcactgcaacctccctgcctgattctcctgcctcagcctgccgagtgcc

SEQ ID NO: 375 - DNA, 80 bp, synthetic construct
  misc_feature 1..80: note = Synthetic: DF0000282.4:START961:INDEX586:OBS1
  source 1..80: mol_type = other DNA
caagaacagatgggtaatgtaagcagagagatggaaattctaagaaagaatcaaaaagaaatgctagagatcaaaaacac

SEQ ID NO: 376 - DNA, 80 bp, synthetic construct
  misc_feature 1..80: note = Synthetic: DF0000245.4:START1761:INDEX446:OBS1
  source 1..80: mol_type = other DNA
caagagagaagcgactcatcacgtacaagggatcctcaataagattaacagctgatttctcatcagaaaccatggaggcc

SEQ ID NO: 377 - DNA, 80 bp, synthetic construct
  misc_feature 1..80: note = Synthetic: DF0000282.4:START481:INDEX83:OBS1
  source 1..80: mol_type = other DNA
caaggcctgccctcaggagaaactatttaaccagagcctaacctgctggggttttatcagagcctaaccgacctggggga

SEQ ID NO: 378 - DNA, 80 bp, synthetic construct
  misc_feature 1..80: note = Synthetic: DF0000320.4:START2321:INDEX449:OBS1
  source 1..80: mol_type = other DNA
caagggatgtgaaggacctcttcaaggagaactacaaaccactgctcaaggaaataagagaggacacaaacaaatggaaa

SEQ ID NO: 379 - DNA, 80 bp, synthetic construct
  misc_feature 1..80: note = Synthetic: DF0000320.4:START1361:INDEX682:OBS1
  source 1..80: mol_type = other DNA
caagttctgaaattgaggcagtaattaatagcctaccaaccaaaaaaagcccaggaccagacggattcacagccgaattc

SEQ ID NO: 380 - DNA, 80 bp, synthetic construct
  misc_feature 1..80: note = Synthetic: DF0000279.4:START1121:INDEX683:OBS1
  source 1..80: mol_type = other DNA
gtactctagttagtaaatttgtttctcacaggggtatgggttagcaattctgaaactactttatgtgtatactaggattg

SEQ ID NO: 381 - DNA, 80 bp, synthetic construct
  misc_feature 1..80: note = Synthetic: DF0000008.4:START1041:INDEX672:OBS1
  source 1..80: mol_type = other DNA
caatgaaatagaaaacaaaaaaacaatagagaaaatcaacgaagccaaaagctggttctttgaaaagatcaataaaattg

SEQ ID NO: 382 - DNA, 80 bp, synthetic construct
  misc_feature 1..80: note = Synthetic: DF0000249.4:START81:INDEX387:OBS1
  source 1..80: mol_type = other DNA
caattgcactggcagaatctgtctgatgtaactattttggaactctggagtctattgaaggcttgcaacttccaggggaa

SEQ ID NO: 383 - DNA, 80 bp, synthetic construct
  misc_feature 1..80: note = Synthetic: DF0001198.2:START1:INDEX54:OBS1
  source 1..80: mol_type = other DNA
cacatttcaaactatctacagccaaaggacttgctgactcctttcttgtcaggcttcacagcaaaccaatcacccagaaa

SEQ ID NO: 384 - DNA, 80 bp, synthetic construct
  misc_feature 1..80: note = Synthetic: DF0000284.4:START401:INDEX53:OBS1
  source 1..80: mol_type = other DNA
cgggtgctcacgagaaagactgggggcagggcaggagaccggagaaagccctcctcggtggcgcaggcgtgcaggaggtg

SEQ ID NO: 385 - DNA, 80 bp, synthetic construct
  misc_feature 1..80: note = Synthetic: DF0000285.4:START1681:INDEX401:OBS1
  source 1..80: mol_type = other DNA
cacgaccaagtgggatttatcccaggtatgcaaggctggttcaacattcgaaaatcaattaatgtaatccatcacatcaa

SEQ ID NO: 386 - DNA, 80 bp, synthetic construct
  misc_feature 1..80: note = Synthetic: DF0000320.4:START1681:INDEX796:OBS1
  source 1..80: mol_type = other DNA
cacgatcaagtcggcttcatccctgggatgcaaggctggttcaacatacgcaaatcaataaacgtaatccatcacataaa

SEQ ID NO: 387 - DNA, 80 bp, synthetic construct
  misc_feature 1..80: note = Synthetic: DF0000010.4:START2321:INDEX575:OBS1
  source 1..80: mol_type = other DNA
catgaaagacaaagaaagactgaggaactgttccagattaaaggagactaaagagacatgacaactaaatgcaacgcgtg

SEQ ID NO: 388 - DNA, 80 bp, synthetic construct
  misc_feature 1..80: note = Synthetic: DF0000248.4:START641:INDEX77:OBS1
  source 1..80: mol_type = other DNA
cactgtccccgcccccagctccggagcagtggctcagagattttgcccagggggagaggcaggccataagaacagagagc

SEQ ID NO: 389 - DNA, 80 bp, synthetic construct
  misc_feature 1..80: note = Synthetic: DF0001280.2:START81:INDEX434:OBS1
  source 1..80: mol_type = other DNA
cacttataaggcacttaatggccgcggcccaatatatttgtcagatcttttgtcaccatatgtccccggtcgctcattga

SEQ ID NO: 390 - DNA, 80 bp, synthetic construct
  misc_feature 1..80: note = Synthetic: DF0000320.4:START1761:INDEX773:OBS1
  source 1..80: mol_type = other DNA
cagaaccaatgacaaaaaccacatgattatctcaatagatgcagaaaaggccttcgataaaattcaacaccccttcatgc

SEQ ID NO: 391 - DNA, 80 bp, synthetic construct
  misc_feature 1..80: note = Synthetic: DF0000008.4:START1761:INDEX548:OBS1
  source 1..80: mol_type = other DNA
cagaataaaggagaaaaatcatatgatcatctcaatagatgcagaaaaagcatttgacaaaattcaacacccattcatga

SEQ ID NO: 392 - DNA, 80 bp, synthetic construct
  misc_feature 1..80: note = Synthetic: DF0000276.4:START721:INDEX582:OBS1
  source 1..80: mol_type = other DNA
gttgccaggggttcggggggagggagggagggatgaataggtggagcacaggggatttttagggcagtgaaactattctg

SEQ ID NO: 393 - DNA, 80 bp, synthetic construct
  misc_feature 1..80: note = Synthetic: DF0000282.4:START161:INDEX352:OBS1
  source 1..80: mol_type = other DNA
cagacaggcggatacagagaatcacaacttaccggagcagaaacccacgagcagaaacctccgcgggaaccagtgccggg

SEQ ID NO: 394 - DNA, 80 bp, synthetic construct
  misc_feature 1..80: note = Synthetic: DF0000278.4:START401:INDEX632:OBS1
  source 1..80: mol_type = other DNA
cagagcacagactacagggaagggacttaaaagtacgcgcgatttaaaggggcagtcttcgaaaagcatagcttctgggg

SEQ ID NO: 395 - DNA, 80 bp, synthetic construct
  misc_feature 1..80: note = Synthetic: DF0000245.4:START801:INDEX438:OBS1
  source 1..80: mol_type = other DNA
cagagcccctcggcaaagactgggagacttattggttccaggcatttaaggaaatctctgtccaatcattagctgaccac

SEQ ID NO: 396 - DNA, 80 bp, synthetic construct
  misc_feature 1..80: note = Synthetic: DF0000975.4:START1:INDEX348:OBS1
  source 1..80: mol_type = other DNA
cagaggggcagcgtggtgcagtggaaagagcacgggctttggagtcagacagacctgggttcgaatcccggctctgccac

SEQ ID NO: 397 - DNA, 80 bp, synthetic construct
  misc_feature 1..80: note = Synthetic: DF0000010.4:START1521:INDEX75:OBS1
  source 1..80: mol_type = other DNA
cagatcttggtttctaaataccattctccactaaaaggaaccagggctccttggagaaatggctgattccagggctgggg

SEQ ID NO: 398 - DNA, 80 bp, synthetic construct
  misc_feature 1..80: note = Synthetic: DF0000249.4:START721:INDEX525:OBS1
  source 1..80: mol_type = other DNA
cagcaaaccctggggaagggggagaatctgatttccagagttaccacattattagattcaaatgtccagttttcaacaac

SEQ ID NO: 399 - DNA, 80 bp, synthetic construct
  misc_feature 1..80: note = Synthetic: DF0000283.4:START161:INDEX930:OBS1
  source 1..80: mol_type = other DNA
cagccgagatctgcttacctggagcagaagccgctggagacataaactggtaggaacacttaaatggtaattttgacgaa

SEQ ID NO: 400 - DNA, 80 bp, synthetic construct
  misc_feature 1..80: note = Synthetic: DF0001198.2:START561:INDEX662:OBS1
  source 1..80: mol_type = other DNA
tggttcacctcccagattacagaaactgactgcctcattaatgattaaaacagcagctggtaatgtcttggagcaggctg

SEQ ID NO: 401 - DNA, 80 bp, synthetic construct
  misc_feature 1..80: note = Synthetic: DF0001333.2:START81:INDEX396:OBS1
  source 1..80: mol_type = other DNA
cagctctccagactccagcacgtgcagaatgctgctgcccgccttctcacacgcacaaagaagtgcgaccacatcacccc

SEQ ID NO: 402 - DNA, 80 bp, synthetic construct
  misc_feature 1..80: note = Synthetic: DF0000245.4:START1121:INDEX428:OBS1
  source 1..80: mol_type = other DNA
caggaaaaaaagcagtcaatagaaactgtccctgaggaagcccagacgttggacttactagacaaagactttaaatcagc

SEQ ID NO: 403 - DNA, 80 bp, synthetic construct
  misc_feature 1..80: note = Synthetic: DF0000247.4:START561:INDEX14:OBS1
  source 1..80: mol_type = other DNA
caggagagaccggagagggcccaagctatccacacatccctggctgaacgtgaggccttgcgcacgcgcagaggagacgc

SEQ ID NO: 404 - DNA, 80 bp, synthetic construct
  misc_feature 1..80: note = Synthetic: DF0000042.4:START81:INDEX302:OBS1
  source 1..80: mol_type = other DNA
gagaccagcctgaccaacatggagaaaccccgtctctactaaaaatacaaaaattagccgggcgtggtggcgcatgcctg

SEQ ID NO: 405 - DNA, 80 bp, synthetic construct
  misc_feature 1..80: note = Synthetic: DF0000285.4:START1761:INDEX633:OBS1
  source 1..80: mol_type = other DNA
caggctaaagaagaaaaatcacatgatcatatcaatagatgcagaaaaagcatttgacaaaatccaacacccattcatga

SEQ ID NO: 406 - DNA, 80 bp, synthetic construct
  misc_feature 1..80: note = Synthetic: DF0000248.4:START1121:INDEX414:OBS1
  source 1..80: mol_type = other DNA
cagggaaagagacagtcaaagagagccctgctaaaaccactgtcatcccagggtgactgtgcgcatgcccaaggctgcgc

SEQ ID NO: 407 - DNA, 80 bp, synthetic construct
  misc_feature 1..80: note = Synthetic: DF0000279.4:START1601:INDEX801:OBS1
  source 1..80: mol_type = other DNA
gaacatcttgtggtgccagaaagtaaggaagtgctcaaaaaaagatgggggcatgtcaaaaggacacaggagccaacctg

SEQ ID NO: 408 - DNA, 80 bp, synthetic construct
  misc_feature 1..80: note = Synthetic: DF0000248.4:START2721:INDEX373:OBS1
  source 1..80: mol_type = other DNA
cataaaattatataaagtaataattataacaatgtattgttgggtttgtaacatatatagatgtaatatgtataacaata

SEQ ID NO: 409 - DNA, 80 bp, synthetic construct
  misc_feature 1..80: note = Synthetic: DF0000248.4:START2321:INDEX359:OBS1
  source 1..80: mol_type = other DNA
ttcaggctgaaagcaagtgaccccagacggtaattcgaatccacacgaaaaaacaaagagcaccggtaaaggtaattatg

SEQ ID NO: 410 - DNA, 80 bp, synthetic construct
  misc_feature 1..80: note = Synthetic: DF0000278.4:START2161:INDEX409:OBS1
  source 1..80: mol_type = other DNA
cataattataaaataatatgacagaattaagaccaaacatatcagtaataacaataaatgtaaatgggctaaactcacca

SEQ ID NO: 411 - DNA, 80 bp, synthetic construct
  misc_feature 1..80: note = Synthetic: DF0000275.4:START721:INDEX286:OBS1
  source 1..80: mol_type = other DNA
gttgccaggggttgggggggagggagggatgaataggcggagcacagaggatttttagggcagtgaaactactctgtatg

SEQ ID NO: 412 - DNA, 80 bp, synthetic construct
  misc_feature 1..80: note = Synthetic: DF0000280.4:START1521:INDEX785:OBS1
  source 1..80: mol_type = other DNA
cataccagaaagcaaggaagctatcaaagactactagggtcgtgtcaaaaggactcaggagccaacttgaagaggctccc

SEQ ID NO: 413 - DNA, 80 bp, synthetic construct
  misc_feature 1..80: note = Synthetic: DF0000320.4:START2961:INDEX337:OBS1
  source 1..80: mol_type = other DNA
cataggcatgggcaaagacttcatgactaaaacaccaaaagcaatggcaacaaaagccaaaattgacaaatgggatctaa

SEQ ID NO: 414 - DNA, 80 bp, synthetic construct
  misc_feature 1..80: note = Synthetic: DF0000282.4:START2321:INDEX366:OBS1
  source 1..80: mol_type = other DNA
ttaaacgtcaatggtctaaatacaccaattaaaagacagagattgtcagagtggatcaaaaaacaagacccaactatatg

SEQ ID NO: 415 - DNA, 80 bp, synthetic construct
  misc_feature 1..80: note = Synthetic: DF0000282.4:START2081:INDEX520:OBS1
  source 1..80: mol_type = other DNA
ttagttgtaaatgtatattgcaaactctagggcaaccactaaaaaaagttaaaaaaaaaaaaagaagtataactgatatg

SEQ ID NO: 416 - DNA, 80 bp, synthetic construct
  misc_feature 1..80: note = Synthetic: DF0000277.4:START1281:INDEX747:OBS1
  source 1..80: mol_type = other DNA
gagttggagacatcagtatgaactcatgtttagcttaatatagatacagatggttacatatagaaatatttatagatatg

SEQ ID NO: 417 - DNA, 80 bp, synthetic construct
  misc_feature 1..80: note = Synthetic: DF0001071.4:START881:INDEX505:OBS1
  source 1..80: mol_type = other DNA
ggggatgggccatgatgacaatggcggttttgtggaatagaaaggcgggaagggtggggaaaaaattgagaaatcggatg

SEQ ID NO: 418 - DNA, 80 bp, synthetic construct
  misc_feature 1..80: note = Synthetic: DF0001333.2:START161:INDEX902:OBS1
  source 1..80: mol_type = other DNA
catcctcaaacaactccactggctccccattcatttcaggatccagttcaaaattgccctccttgtttttaaaaccctcc

SEQ ID NO: 419 - DNA, 80 bp, synthetic construct
  misc_feature 1..80: note = Synthetic: DF0000250.4:START1681:INDEX220:OBS1
  source 1..80: mol_type = other DNA
catgaccaagtgggatttatcccaggaatgcaaggttggttcaacatacgaaaatcaatcaatgtaatacaccatattaa

SEQ ID NO: 420 - DNA, 80 bp, synthetic construct
  misc_feature 1..80: note = Synthetic: DF0000008.4:START1681:INDEX731:OBS1
  source 1..80: mol_type = other DNA
catgaccaagtggggtttatcccaggaatgcaaggttggtttaacattcgaaaatcaatcaatgtaattcaccatattaa

SEQ ID NO: 421 - DNA, 80 bp, synthetic construct
  misc_feature 1..80: note = Synthetic: DF0000281.4:START1681:INDEX707:OBS1
  source 1..80: mol_type = other DNA
catgagttcataataaaaaaaactcattggtcacctttggaggttgctagggcaccaactcattattctgaaaactggta

SEQ ID NO: 422 - DNA, 80 bp, synthetic construct
  misc_feature 1..80: note = Synthetic: DF0000015.4:START1:INDEX278:OBS1
  source 1..80: mol_type = other DNA
cattctcagaaactactttgtgatgtgtgcgttcaactcacagagtttaacctttcttttcatagagcagtttggaaaca

SEQ ID NO: 423 - DNA, 80 bp, synthetic construct
  misc_feature 1..80: note = Synthetic: DF0000029.4:START1:INDEX296:OBS1
  source 1..80: mol_type = other DNA
cattctcagaaacttctttgtgatgtgtgcattcaactcacagagttgaaccttccttttgatagagcagttttgaaaca

SEQ ID NO: 424 - DNA, 80 bp, synthetic construct
  misc_feature 1..80: note = Synthetic: DF0000319.4:START961:INDEX478:OBS1
  source 1..80: mol_type = other DNA
tgccacccaactgggtgagaccctccaacaggggttgtcagacaccctatacaggagcgatcctactggcatcaggttgg

SEQ ID NO: 425 - DNA, 80 bp, synthetic construct
  misc_feature 1..80: note = Synthetic: DF0000319.4:START401:INDEX593:OBS1
  source 1..80: mol_type = other DNA
gcctgccgagctcccggggggaggggcgaccagcaccacggctgcggctgcctgctgtctaagccgtttgagctccttgg

SEQ ID NO: 426 - DNA, 80 bp, synthetic construct
  misc_feature 1..80: note = Synthetic: DF0000246.4:START641:INDEX614:OBS1
  source 1..80: mol_type = other DNA
cccacacacagatccatcggcagagggtggaagccttacgggctcgaggtgtttgagcacaacctctgcccaatcattgg

SEQ ID NO: 427 - DNA, 80 bp, synthetic construct
  misc_feature 1..80: note = Synthetic: DF0000318.4:START1281:INDEX842:OBS1
  source 1..80: mol_type = other DNA
ccacgcaaaaaccccatccgaaggtcaccaacatcaaagaccaaaggtagataaatccacgaagatgaggaaaaaccagc

SEQ ID NO: 428 - DNA, 80 bp, synthetic construct
  misc_feature 1..80: note = Synthetic: DF0000319.4:START1062:INDEX947:OBS1
  source 1..80: mol_type = other DNA
ccagaagaaggagcaggcacccatctttgctgttctccagcctccttgagtgacatctccaggcgcgggagcgaaccaga

SEQ ID NO: 429 - DNA, 80 bp, synthetic construct
  misc_feature 1..80: note = Synthetic: DF0000250.4:START2561:INDEX351:OBS1
  source 1..80: mol_type = other DNA
ccagaatagccaaaacaatcttgaaaaagaagaacaaagttggaggactcacacttcccgatttcaaaacttactacaaa

SEQ ID NO: 430 - DNA, 80 bp, synthetic construct
  misc_feature 1..80: note = Synthetic: DF0000285.4:START2561:INDEX868:OBS1
  source 1..80: mol_type = other DNA
ccagaatagccaacacaatattgaaggagaagaacaaagtcggaggactgacactacccgacttcaagacttactataaa

SEQ ID NO: 431 - DNA, 80 bp, synthetic construct
  misc_feature 1..80: note = Synthetic: DF0000016.4:START161:INDEX523:OBS1
  source 1..80: mol_type = other DNA
ccaggttgcctaaggaggggtgaaccggcccaggtcggaaacggagcaggtcaaaactcccgtgctgatcagtagtggga

SEQ ID NO: 432 - DNA, 80 bp, synthetic construct
  misc_feature 1..80: note = Synthetic: DF0000277.4:START1201:INDEX544:OBS1
  source 1..80: mol_type = other DNA
ccaggtttctcactgttggagtgggagattacagataagcaaggggaggaggctagaatgatccatgtggtaatggatta

SEQ ID NO: 433 - DNA, 80 bp, synthetic construct
  misc_feature 1..80: note = Synthetic: DF0000010.4:START401:INDEX574:OBS1
  source 1..80: mol_type = other DNA
gagaaatgaaaacatatgtccacacaaaaacctgtacacgaatgtttatagcagctttattcataatagccaaaaactgg

SEQ ID NO: 434 - DNA, 80 bp, synthetic construct
  misc_feature 1..80: note = Synthetic: DF0000360.4:START1:INDEX859:OBS1
  source 1..80: mol_type = other DNA
tcgcacgatctggccccgctacctctccggcctcatctcctaccactctccccttgctcactctgctccagccacactgg

SEQ ID NO: 435 - DNA, 80 bp, synthetic construct
  misc_feature 1..80: note = Synthetic: DF0000277.4:START401:INDEX696:OBS1
  source 1..80: mol_type = other DNA
ctgatttgaaaacttatgtccacacaaaaacctgcacgcgaatgtttatagcagctttattcataatcgccaaaaactgg

SEQ ID NO: 436 - DNA, 80 bp, synthetic construct
  misc_feature 1..80: note = Synthetic: DF0000280.4:START1681:INDEX730:OBS1
  source 1..80: mol_type = other DNA
ccatgagttcataatgatacttaaaaaaaactcattggtcacctttggaggatgctagggaaccaactcattattttgaa

SEQ ID NO: 437 - DNA, 80 bp, synthetic construct
  misc_feature 1..80: note = Synthetic: DF0000284.4:START1361:INDEX534:OBS1
  source 1..80: mol_type = other DNA
ccattgtcaagagacaaagcaatcaacagaaccagactcagaaatgacacagatgttggaactatcagacagggaattta

SEQ ID NO: 438 - DNA, 80 bp, synthetic construct
  misc_feature 1..80: note = Synthetic: DF0000319.4:START641:INDEX905:OBS1
  source 1..80: mol_type = other DNA
cccaacacaccggctgtggcagactgcggccagagtgcctcttcaggcctgaccctgacccatccttcctcactgggcgg

SEQ ID NO: 439 - DNA, 80 bp, synthetic construct
  misc_feature 1..80: note = Synthetic: DF0000010.4:START961:INDEX460:OBS1
  source 1..80: mol_type = other DNA
cccaggatggaatgcagactgtgacaaaagaatctaactgtattacaaatgaatgaaacaaccacactgaaggggatggg

SEQ ID NO: 440 - DNA, 80 bp, synthetic construct
  misc_feature 1..80: note = Synthetic: DF0000282.4:START321:INDEX674:OBS1
  source 1..80: mol_type = other DNA
cccagtcataggggggcccccacacttttgtgagttttacctccaggagctcaaccaggttctcacagtgaatatcggag

SEQ ID NO: 441 - DNA, 80 bp, synthetic construct
  misc_feature 1..80: note = Synthetic: DF0000280.4:START2481:INDEX482:OBS1
  source 1..80: mol_type = other DNA
tactgaaatatttacggatgaaatgatatgatgtctgggatttgcttcaaaataatccgggagggaggaagtgggtgggg

SEQ ID NO: 442 - DNA, 80 bp, synthetic construct
  misc_feature 1..80: note = Synthetic: DF0000277.4:START1041:INDEX253:OBS1
  source 1..80: mol_type = other DNA
gtggagtctgtaagactaaaggcaaaaggaactgtacataagcactgtactctagttgataaagttgtttcccacggggg

SEQ ID NO: 443 - DNA, 80 bp, synthetic construct
  misc_feature 1..80: note = Synthetic: DF0000318.4:START401:INDEX463:OBS1
  source 1..80: mol_type = other DNA
gcaggagttttttttttacataccccagtggcgcctggaacgccagcgagacagaaccgttcactcccctggaaaggggg

SEQ ID NO: 444 - DNA, 80 bp, synthetic construct
  misc_feature 1..80: note = Synthetic: DF0000249.4:START241:INDEX225:OBS1
  source 1..80: mol_type = other DNA
ccccgtggcaggcagctgtgcacgtgttcctggagcagcttgcacacagcttgcgggagccagggtgggcaaaaaggacc

SEQ ID NO: 445 - DNA, 80 bp, synthetic construct
  misc_feature 1..80: note = Synthetic: DF0000249.4:START321:INDEX845:OBS1
  source 1..80: mol_type = other DNA
ctgtcctccaaatatcggggatctgtgctctgatcgctgattgctgcttctgatcacagaggtgcagacaaagaggcggg

SEQ ID NO: 446 - DNA, 80 bp, synthetic construct
  misc_feature 1..80: note = Synthetic: DF0000320.4:START2561:INDEX400:OBS1
  source 1..80: mol_type = other DNA
cccgtatagccaagacaatcctaagcaaaaagaacaaagctggaggcatcacgctacctgacttcaaactatactacaag

SEQ ID NO: 447 - DNA, 80 bp, synthetic construct
  misc_feature 1..80: note = Synthetic: DF0001280.2:START282:INDEX607:OBS1
  source 1..80: mol_type = other DNA
cccgtctgtctcggcatttaaaactaaagtcgaagcatatctgttcgccgccgcatttgaaaactcttaaggaaaaaata

SEQ ID NO: 448 - DNA, 80 bp, synthetic construct
  misc_feature 1..80: note = Synthetic: DF0000282.4:START1601:INDEX892:OBS1
  source 1..80: mol_type = other DNA
tagaattctgtacccagcgaaattatccttcaaaagtgaaggagaaataaagactttctcagacaaacaaaaattgaggg

SEQ ID NO: 449 - DNA, 80 bp, synthetic construct
  misc_feature 1..80: note = Synthetic: DF0000320.4:START1601:INDEX89:OBS1
  source 1..80: mol_type = other DNA
ccctgatgaacatcgatgcgaaaatcctcaataaaatactggcaaaccgaatccagcagcacatcaaaaagcttatccac

SEQ ID NO: 450 - DNA, 80 bp, synthetic construct
  misc_feature 1..80: note = Synthetic: DF0001280.2:START241:INDEX909:OBS1
  source 1..80: mol_type = other DNA
ccctgattgtggaatttacttccaatttctattcatagtgccccgtctgtctcggcatttaaaactaaagtcgaagcata

SEQ ID NO: 451 - DNA, 80 bp, synthetic construct
  misc_feature 1..80: note = Synthetic: DF0000250.4:START1601:INDEX782:OBS1
  source 1..80: mol_type = other DNA
cccttatgaatatagatgcaaaaatcctcaacaaaatactagcaaaccgaatccagcaacatataaaaaggattatacac

SEQ ID NO: 452 - DNA, 80 bp, synthetic construct
  misc_feature 1..80: note = Synthetic: DF0000360.4:START161:INDEX519:OBS1
  source 1..80: mol_type = other DNA
cccttccccacctcttcgcctggccaactcctactcatccttcaggtctcagctcaaatgtcacctcctccgggaagccc

SEQ ID NO: 453 - DNA, 80 bp, synthetic construct
  misc_feature 1..80: note = Synthetic: DF0001068.4:START161:INDEX458:OBS1
  source 1..80: mol_type = other DNA
tgggattgcaggcgcgcgccgccacgcctgactggttttcgtattttttggtggagacggggtttcgccgtgttggccgg

SEQ ID NO: 454 - DNA, 80 bp, synthetic construct
  misc_feature 1..80: note = Synthetic: DF0000279.4:START2481:INDEX942:OBS1
  source 1..80: mol_type = other DNA
gttaatttcctggttttgataattgtactatggttatgtaagatgttaacattaggggaagctgggtgaagggtatacgg

SEQ ID NO: 455 - DNA, 80 bp, synthetic construct
  misc_feature 1..80: note = Synthetic: DF0001161.2:START1:INDEX958:OBS1
  source 1..80: mol_type = other DNA
gtgctcaactgggggctgcccttgaagaccacccggaagcttcagctggtgcagaatgcagcggctcgtctgctgaaagg

SEQ ID NO: 456 - DNA, 80 bp, synthetic construct
  misc_feature 1..80: note = Synthetic: DF0000282.4:START1041:INDEX769:OBS1
  source 1..80: mol_type = other DNA
tgtaacagaaatgaagaatgcctttgatgggctcattagtagactggacacggctgaggaaagaatctctgagcttgagg

SEQ ID NO: 457 - DNA, 80 bp, synthetic construct
  misc_feature 1..80: note = Synthetic: DF0000283.4:START881:INDEX652:OBS1
  source 1..80: mol_type = other DNA
cctcacactaaaggcctatttacctcagttcctattacccgatacatcatgtccggctttcaacaaaaaattacaaggca

SEQ ID NO: 458 - DNA, 80 bp, synthetic construct
  misc_feature 1..80: note = Synthetic: DF0000010.4:START1921:INDEX30:OBS1
  source 1..80: mol_type = other DNA
tggcaaccatcatagtaataattgattcaggcaagaatcatcaatggatgctaaaactagtgggtgaaagtttgatgagg

SEQ ID NO: 459 - DNA, 80 bp, synthetic construct
  misc_feature 1..80: note = Synthetic: DF0000248.4:START1201:INDEX435:OBS1
  source 1..80: mol_type = other DNA
cctctgaggagcgacatcagaggcttcacactgcgggggaaatagacttcactaaaatagtccagccaagtcactaaaca

SEQ ID NO: 460 - DNA, 80 bp, synthetic construct
  misc_feature 1..80: note = Synthetic: DF0000249.4:START881:INDEX288:OBS1
  source 1..80: mol_type = other DNA
cctgaaaaagacctgatggcagatctactagacaaagactttaaaacaactgtcttaaagatgctcaaagaactaaagga

SEQ ID NO: 461 - DNA, 80 bp, synthetic construct
  misc_feature 1..80: note = Synthetic: DF0000275.4:START81:INDEX82:OBS1
  source 1..80: mol_type = other DNA
cctaaacagacacctcaccaaagaagatatacagatggcaaataagcatatgaaaagatgctccacatcatatgtcatca

SEQ ID NO: 462 - DNA, 80 bp, synthetic construct
  misc_feature 1..80: note = Synthetic: DF0001161.2:START81:INDEX130:OBS1
  source 1..80: mol_type = other DNA
tgtaagccacaaggagcacattacacctgtgctccgcagtctgcactggctaccaatttgcttccgagtgcaattcaagg

SEQ ID NO: 463 - DNA, 80 bp, synthetic construct
  misc_feature 1..80: note = Synthetic: DF0000250.4:START2961:INDEX651:OBS1
  source 1..80: mol_type = other DNA
ccttggattaggcaatggtttcttagatatgacaccaaaagcacaagcaacaaaagaaaaaatagataaattggacttca

SEQ ID NO: 464 - DNA, 80 bp, synthetic construct
  misc_feature 1..80: note = Synthetic: DF0000008.4:START2961:INDEX874:OBS1
  source 1..80: mol_type = other DNA
ccttgggataggcaaagatttcttaaacaggacacaaaaagcacaaaccataaaagaaaaaattgataaattggactaca

SEQ ID NO: 465 - DNA, 80 bp, synthetic construct
  misc_feature 1..80: note = Synthetic: DF0000285.4:START2961:INDEX128:OBS1
  source 1..80: mol_type = other DNA
ccttgggtttggcgatgactttttagatacaacaccaaaggcacgatccatgaaagaaaaaattgataagctggacttca

SEQ ID NO: 466 - DNA, 80 bp, synthetic construct
  misc_feature 1..80: note = Synthetic: DF0000010.4:START2561:INDEX318:OBS1
  source 1..80: mol_type = other DNA
ccttgttcttaggaaatacacactgaagtatttaggggtaaaggggcataatgtctgcaacttactctcaaatggttcag

SEQ ID NO: 467 - DNA, 80 bp, synthetic construct
  misc_feature 1..80: note = Synthetic: DF0000249.4:START401:INDEX155:OBS1
  source 1..80: mol_type = other DNA
cggccattgttgttgcacctccccccattgttgcaagcccctccccctccggctgaagtgacttccaggggatttaaagg

SEQ ID NO: 468 - DNA, 80 bp, synthetic construct
  misc_feature 1..80: note = Synthetic: DF0001198.2:START401:INDEX869:OBS1
  source 1..80: mol_type = other DNA
cctttgagcatatgtatgccgatgaaacggtgttatattacagaacaccgaccttgccccaggttatcagcagcccgcag

SEQ ID NO: 469 - DNA, 80 bp, synthetic construct
  misc_feature 1..80: note = Synthetic: DF0000147.4:START1:INDEX591:OBS1
  source 1..80: mol_type = other DNA
gccgggcgcggtggcacgcgcctgtagtcccagctactcgggaggctgaggcgggaggatcgcttgagcccaggagttcg

SEQ ID NO: 470 - DNA, 80 bp, synthetic construct
  misc_feature 1..80: note = Synthetic: DF0000976.4:START1:INDEX771:OBS1
  source 1..80: mol_type = other DNA
cgaggcagtgtggtgcagtggaaagagcactggacttggagtcaggaagacctgggttcgagtcccggctctgccactta

SEQ ID NO: 471 - DNA, 80 bp, synthetic construct
  misc_feature 1..80: note = Synthetic: DF0000278.4:START241:INDEX862:OBS1
  source 1..80: mol_type = other DNA
cgcaaggctttgtggcgagcaaaggcagaccgagaaaaactgcagggaagaaagaagaggggagctagcgaagggaccta

SEQ ID NO: 472 - DNA, 80 bp, synthetic construct
  misc_feature 1..80: note = Synthetic: DF0000319.4:START241:INDEX485:OBS1
  source 1..80: mol_type = other DNA
gtgagcgtgctacccagccggggaaaccgtgctttttccacggaactgtgcaacccacggatcggaagatcccactcgcg

SEQ ID NO: 473 - DNA, 80 bp, synthetic construct
  misc_feature 1..80: note = Synthetic: DF0000035.4:START161:INDEX800:OBS2
  source 1..80: mol_type = other DNA
tagtcccagctactcgggaggctgaggcgggaggatcgcttgagcccaggagatcgaggctgcagtgagctatgatcgcg

SEQ ID NO: 474 - DNA, 80 bp, synthetic construct
  misc_feature 1..80: note = Synthetic: DF0000247.4:START321:INDEX161:OBS1
  source 1..80: mol_type = other DNA
cggagcgcggaaaaaccccacgcccaggggcattgtcggaaacagtagcgatctcggtggcaaacgaacggggaaggcca

SEQ ID NO: 475 - DNA, 80 bp, synthetic construct
  misc_feature 1..80: note = Synthetic: DF0001072.4:START881:INDEX231:OBS1
  source 1..80: mol_type = other DNA
ggccaggatgacaatggcggctttgtggaatagaaaggcgggaaaggtggggaaaagattgagaaatcggatggttgccg

SEQ ID NO: 476 - DNA, 80 bp, synthetic construct
  misc_feature 1..80: note = Synthetic: DF0000248.4:START481:INDEX637:OBS1
  source 1..80: mol_type = other DNA
cggcaggccgagaatactggggccccgatcgccctcgccccagctcgctcgtagggcggaggttccacgccgggagaggc

SEQ ID NO: 477 - DNA, 80 bp, synthetic construct
  misc_feature 1..80: note = Synthetic: DF0001067.4:START81:INDEX173:OBS1
  source 1..80: mol_type = other DNA
ctggactgcactgccgtgatctcggctcgctgcaacctccctgcctcgggctccagcgatcctcctgcctcggcctcccg

SEQ ID NO: 478 - DNA, 80 bp, synthetic construct
  misc_feature 1..80: note = Synthetic: DF0000281.4:START321:INDEX743:OBS1
  source 1..80: mol_type = other DNA
gggaatttggcaatatctagcaaaattacatatgcatttaccctttgacccagcaatcccacttctaggaatctatcccg

SEQ ID NO: 479 - DNA, 80 bp, synthetic construct
  misc_feature 1..80: note = Synthetic: DF0000319.4:START881:INDEX509:OBS1
  source 1..80: mol_type = other DNA
gacgagtgggtttccccccagcgaagcacaccccctccaccaagggacaaagtgcttcgttaaacgggtcctgctccccg

SEQ ID NO: 480 - DNA, 80 bp, synthetic construct
  misc_feature 1..80: note = Synthetic: DF0001071.4:START161:INDEX755:OBS1
  source 1..80: mol_type = other DNA
tgcgattgcaggcgcgcgccgccacgcctgactggttttcgtttttttttggtggagacggggtctcgctgtgttgaccg

SEQ ID NO: 481 - DNA, 80 bp, synthetic construct
  misc_feature 1..80: note = Synthetic: DF0000284.4:START1041:INDEX911:OBS1
  source 1..80: mol_type = other DNA
gagggtggagcaggaacactgagaaaaaccctccggcaaaccagcccccacactaagcacaaggtaacagcagcccaccg

SEQ ID NO: 482 - DNA, 80 bp, synthetic construct
  misc_feature 1..80: note = Synthetic: DF0000282.4:START1921:INDEX784:OBS1
  source 1..80: mol_type = other DNA
cgtgtgatatatatatatgcttatatatgcttatgtataagtgaaatgaatgacagcaatgatacaagggacgggaggga

SEQ ID NO: 483 - DNA, 80 bp, synthetic construct
  misc_feature 1..80: note = Synthetic: DF0000008.4:START2561:INDEX922:OBS1
  source 1..80: mol_type = other DNA
caagaatagccaaaacaatcttgaaaaagaagaacaaagttggaggacttacactaccagatatcaagacttattataaa

SEQ ID NO: 484 - DNA, 80 bp, synthetic construct
  misc_feature 1..80: note = Synthetic: DF0000282.4:START2161:INDEX202:OBS1
  source 1..80: mol_type = other DNA
ctaagaaaggagagaaaatggaatcatataaaatgctcaattaaaaccacaaaaggcagaaaaagagtggaagacaaaaa

SEQ ID NO: 485 - DNA, 80 bp, synthetic construct
  misc_feature 1..80: note = Synthetic: DF0001198.2:START161:INDEX864:OBS1
  source 1..80: mol_type = other DNA
ctaaggcatttgatttagacgaccataaataatccctacaaaaactaagggatattgggcgacgtagtgactccgtaaag

SEQ ID NO: 486 - DNA, 80 bp, synthetic construct
  misc_feature 1..80: note = Synthetic: DF0000250.4:START2161:INDEX129:OBS1
  source 1..80: mol_type = other DNA
ctaataaacgagttcagcaaggttgcaggatacaagatcaatatacaaaaatcaattgtatttctatacactagcaatga

SEQ ID NO: 487 - DNA, 80 bp, synthetic construct
  misc_feature 1..80: note = Synthetic: DF0000285.4:START2161:INDEX147:OBS1
  source 1..80: mol_type = other DNA
ctaataagcgattatagcaaggttgcaggatacaaggttaatatacaaaagtcaatcgctttcctatataccagcaatga

SEQ ID NO: 488 - DNA, 80 bp, synthetic construct
  misc_feature 1..80: note = Synthetic: DF0000008.4:START2161:INDEX763:OBS1
  source 1..80: mol_type = other DNA
ctaataagtgaatttagcaaggtcgcaggatacaaggtcaatatacaaaaatcaattgtatttctatatactagcaacaa

SEQ ID NO: 489 - DNA, 80 bp, synthetic construct
  misc_feature 1..80: note = Synthetic: DF0000249.4:START1841:INDEX536:OBS1
  source 1..80: mol_type = other DNA
ttattgtaacgatggtttgtaactccactttttgttttctacatgatttaagagactaatacattttaaaaaattattag

SEQ ID NO: 490 - DNA, 80 bp, synthetic construct
  misc_feature 1..80: note = Synthetic: DF0000279.4:START1:INDEX314:OBS1
  source 1..80: mol_type = other DNA
ctaatatccctaatatataaagaactcttaaaaatagaaagaaaaagaccaaaaacccgatagaaaaatgggcaaaagac

SEQ ID NO: 491 - DNA, 80 bp, synthetic construct
  misc_feature 1..80: note = Synthetic: DF0000281.4:START1921:INDEX816:OBS1
  source 1..80: mol_type = other DNA
ctaatgaaataatggatctaggcaacgatcatcaatggatgctaaaaccattaggtgaaaggctgatggggaactttata

SEQ ID NO: 492 - DNA, 80 bp, synthetic construct
  misc_feature 1..80: note = Synthetic: DF0000277.4:START2161:INDEX58:OBS1
  source 1..80: mol_type = other DNA
ctacaaaatacctgaccagtactcctcaaaactgtcaaggtcatcaaaaacaaggaaagtctgagaaactgtcacagcca

SEQ ID NO: 493 - DNA, 80 bp, synthetic construct
  misc_feature 1..80: note = Synthetic: DF0000359.4:START1:INDEX573:OBS1
  source 1..80: mol_type = other DNA
ctacatgatctggccccccgttacctctctgacctcatctcctaccactctccccctcgctcactccgctccagccacac

SEQ ID NO: 494 - DNA, 80 bp, synthetic construct
  misc_feature 1..80: note = Synthetic: DF0000280.4:START1361:INDEX468:OBS1
  source 1..80: mol_type = other DNA
ctagaaacaatgaccaacccagtagcaatgagcacccctagcgcccagattgtggtctctaaataccatttcccactaaa

SEQ ID NO: 495 - DNA, 80 bp, synthetic construct
  misc_feature 1..80: note = Synthetic: DF0000281.4:START1361:INDEX732:OBS1
  source 1..80: mol_type = other DNA
ctagaagcaatgacaacccagtagcaatgagcacccctagcgcccagattatggtctctaaataccatttcccactaaaa

SEQ ID NO: 496 - DNA, 80 bp, synthetic construct
  misc_feature 1..80: note = Synthetic: DF0000284.4:START1121:INDEX893:OBS1
  source 1..80: mol_type = other DNA
ctagaggaatttgaagcctgtggtgcactgaaggtaaccatagcaacaacaaaacccaaacccagctcaactcctgacta

SEQ ID NO: 497 - DNA, 80 bp, synthetic construct
  misc_feature 1..80: note = Synthetic: DF0000319.4:START721:INDEX420:OBS1
  source 1..80: mol_type = other DNA
ggcttccctgcaggaactccaataactccagccagaggctcagggacagaactcggatctccctgggcctgagcccctag

SEQ ID NO: 498 - DNA, 80 bp, synthetic construct
  misc_feature 1..80: note = Synthetic: DF0000285.4:START1361:INDEX810:OBS1
  source 1..80: mol_type = other DNA
ctattaaagaaattgaatcaataattaataaccttccaaaacagaaagcaccaggcccagatgggttcactggtgaattc

SEQ ID NO: 499 - DNA, 80 bp, synthetic construct
  misc_feature 1..80: note = Synthetic: DF0000320.4:START2161:INDEX852:OBS1
  source 1..80: mol_type = other DNA
ctgataagcaacttcagcaaagtctcaggatacaaaatcaatgtgcaaaaatcacaagcattcctatacaccaataatag

SEQ ID NO: 500 - DNA, 80 bp, synthetic construct
  misc_feature 1..80: note = Synthetic: DF0000320.4:START1041:INDEX497:OBS1
  source 1..80: mol_type = other DNA
gaaggagatagagacacgaaaaacccttcaaaaaatcaatgaatccaggagctggttttttgaaaagattaacaaaatag

SEQ ID NO: 501 - DNA, 80 bp, synthetic construct
  misc_feature 1..80: note = Synthetic: DF0000278.4:START1521:INDEX827:OBS1
  source 1..80: mol_type = other DNA
ctcaaaagcaacatacaaagcaaggcaacagtggagcagcattttcaagaaactcaaggaaagaaagtgtgaaccaagga

SEQ ID NO: 502 - DNA, 80 bp, synthetic construct
  misc_feature 1..80: note = Synthetic: DF0000248.4:START1681:INDEX338:OBS1
  source 1..80: mol_type = other DNA
ctcaacagtagatttgaactggcagaagaaagaatcagcgaacttgaagatagatcgatagagattatgcaatccgaaga

SEQ ID NO: 503 - DNA, 80 bp, synthetic construct
  misc_feature 1..80: note = Synthetic: DF0000974.4:START129:INDEX148:OBS1
  source 1..80: mol_type = other DNA
ctcatctgtaaaatgagggggttggactagatgatctctaaggtcccttccagctctgacattctatgattctatgattc

SEQ ID NO: 504 - DNA, 80 bp, synthetic construct
  misc_feature 1..80: note = Synthetic: DF0000247.4:START241:INDEX195:OBS1
  source 1..80: mol_type = other DNA
ggcgcggtagttctaccagggcggggcaggccgtgaaaaccagcagcttcgctgccggagggggctgacttgatttggag

SEQ ID NO: 505 - DNA, 80 bp, synthetic construct
  misc_feature 1..80: note = Synthetic: DF0000280.4:START721:INDEX496:OBS1
  source 1..80: mol_type = other DNA
taaaaaaaaaacaatggaaggataaaccaaaaattaataaaaatggttacctatagggggagggagggaatagggtggag

SEQ ID NO: 506 - DNA, 80 bp, synthetic construct
  misc_feature 1..80: note = Synthetic: DF0000281.4:START721:INDEX563:OBS1
  source 1..80: mol_type = other DNA
tcaaaaagaaacaatggaaggataaaccaaaaactaataaaaatggttacctatagggggagggagggaacagggtggag

SEQ ID NO: 507 - DNA, 80 bp, synthetic construct
  misc_feature 1..80: note = Synthetic: DF0000277.4:START1121:INDEX59:OBS1
  source 1..80: mol_type = other DNA
tacgggttaacaattctgaaaccgctatacatgtatactggaattgaacaattaagtaaatggatggcggatggtgggag

SEQ ID NO: 508 - DNA, 80 bp, synthetic construct
  misc_feature 1..80: note = Synthetic: DF0000283.4:START321:INDEX925:OBS1
  source 1..80: mol_type = other DNA
gggttttacctccaggaaccccaccaggttctcacggtgaagatccgagaaaaatcccctcgtggctctggcagggggag

SEQ ID NO: 509 - DNA, 80 bp, synthetic construct
  misc_feature 1..80: note = Synthetic: DF0001333.2:START321:INDEX265:OBS1
  source 1..80: mol_type = other DNA
ctcctctctgtcccttcacacaatctcgccgctgttggcgcgagagccttctcctctgcagctcctgccatctggaacag

SEQ ID NO: 510 - DNA, 80 bp, synthetic construct
  misc_feature 1..80: note = Synthetic: DF0000249.4:START1201:INDEX328:OBS1
  source 1..80: mol_type = other DNA
gaaaagtgaacagagcctaagggacctgtgggacaccatcaagcggaccaacatacgcattatgggagtcccagaaggag

SEQ ID NO: 511 - DNA, 80 bp, synthetic construct
  misc_feature 1..80: note = Synthetic: DF0000284.4:START721:INDEX957:OBS1
  source 1..80: mol_type = other DNA
ggatcctgcaccgatacaaagcagaggtctgctaccgctgggagagggacaggtcccatcccaaccacagatacaaggag

SEQ ID NO: 512 - DNA, 80 bp, synthetic construct
  misc_feature 1..80: note = Synthetic: DF0000248.4:START241:INDEX484:OBS1
  source 1..80: mol_type = other DNA
gctcagcgtgacggaagctccactccgggcgggtgcggccaagaaaacggggctccctctccccccagctcccagtcgag

SEQ ID NO: 513 - DNA, 80 bp, synthetic construct
  misc_feature 1..80: note = Synthetic: DF0000246.4:START241:INDEX72:OBS1
  source 1..80: mol_type = other DNA
ctcggtcggcacggtagttctaccagggcggggctggccgtgaaaaccagcagcttcgctgccagagggggctgactcga

SEQ ID NO: 514 - DNA, 80 bp, synthetic construct
  misc_feature 1..80: note = Synthetic: DF0000319.4:START561:INDEX587:OBS1
  source 1..80: mol_type = other DNA
ctctatagctccaggccgcgcttttcccctgctggagccagggaggctggacggcttggtcccaagaaatgtccccacag

SEQ ID NO: 515 - DNA, 80 bp, synthetic construct
  misc_feature 1..80: note = Synthetic: DF0000285.4:START1601:INDEX846:OBS1
  source 1..80: mol_type = other DNA
ctctcatgaacatagatgcaaaaatcctcaacaaaatattagcaaatcgaatccaacaatgtataaaaagaattatacac

SEQ ID NO: 516 - DNA, 80 bp, synthetic construct
  misc_feature 1..80: note = Synthetic: DF0001071.4:START1:INDEX699:OBS1
  source 1..80: mol_type = other DNA
ctctccctctccctctccctctccctctccctctccctctccctctcccctccctccacggtctccctctgatgccgagc

SEQ ID NO: 517 - DNA, 80 bp, synthetic construct
  misc_feature 1..80: note = Synthetic: DF0001198.2:START961:INDEX164:OBS1
  source 1..80: mol_type = other DNA
ctctccgagcgaaggcagcgacattggtttactacattgaataaatgtgttcaaagcttggcaccagcatatttatgttc

SEQ ID NO: 518 - DNA, 80 bp, synthetic construct
  misc_feature 1..80: note = Synthetic: DF0000320.4:START2481:INDEX131:OBS1
  source 1..80: mol_type = other DNA
tatccccatcaagctaccattgactttcttcacagaattagaaaaaactactttaaatttcatatggaaccaaaaaagag

SEQ ID NO: 519 - DNA, 80 bp, synthetic construct
  misc_feature 1..80: note = Synthetic: DF0000282.4:START81:INDEX787:OBS1
  source 1..80: mol_type = other DNA
ctgaaaaatcaacaactcttcttagatccgtcagagaagtgaggtcacagggcaaaccgctgcccccaaaattggagaga

SEQ ID NO: 520 - DNA, 80 bp, synthetic construct
  misc_feature 1..80: note = Synthetic: DF0000318.4:START481:INDEX779:OBS1
  source 1..80: mol_type = other DNA
ctgaagccagggagccaagtggtctagctcagcggatcccacccccacggagcccagcaagctaagatccactggcttga

SEQ ID NO: 521 - DNA, 80 bp, synthetic construct
  misc_feature 1..80: note = Synthetic: DF0000246.4:START721:INDEX592:OBS1
  source 1..80: mol_type = other DNA
ctgaccactaagctatgcagacacaggggcgacccctaggaagccaggctaaaaaataaaaataagaataaaaaaactga

SEQ ID NO: 522 - DNA, 80 bp, synthetic construct
  misc_feature 1..80: note = Synthetic: DF0000284.4:START1201:INDEX464:OBS1
  source 1..80: mol_type = other DNA
gattgactcaacccccacactaaaggcctagcagaagaaaaggcatgcccatttccaggcataaatactatttacctcag

SEQ ID NO: 523 - DNA, 80 bp, synthetic construct
  misc_feature 1..80: note = Synthetic: DF0000245.4:START721:INDEX681:OBS1
  source 1..80: mol_type = other DNA
ctgcgcaagcaggaagtgaaggctaaggcagagttgtaaactgcctggctgagcgttgaaggcgtgccccaacacgcaca

SEQ ID NO: 524 - DNA, 80 bp, synthetic construct
  misc_feature 1..80: note = Synthetic: DF0000246.4:START481:INDEX516:OBS1
  source 1..80: mol_type = other DNA
tggaaatgagagagccatagaagggctagataagctctccacacatccctggctgactgggaaactgcgcgcatgcgcag

SEQ ID NO: 525 - DNA, 80 bp, synthetic construct
  misc_feature 1..80: note = Synthetic: DF0001333.2:START1:INDEX469:OBS1
  source 1..80: mol_type = other DNA
ctgctgaaatcctcatccaagccttcatctcctctcgccttgactattgcaactcccttctctatggcctccccaagtcc

SEQ ID NO: 526 - DNA, 80 bp, synthetic construct
  misc_feature 1..80: note = Synthetic: DF0000320.4:START801:INDEX772:OBS1
  source 1..80: mol_type = other DNA
ggcagaaataaaaaagttctttgaaaccaatgagaacaaagacacaacgtaccagaatctctgggacacagctaaagcag

SEQ ID NO: 527 - DNA, 80 bp, synthetic construct
  misc_feature 1..80: note = Synthetic: DF0000974.4:START1:INDEX295:OBS1
  source 1..80: mol_type = other DNA
ctggcagagtggctgagcagagagagcacggactgggagtcaggagacctgggttctagtcccggctctgccactaacta

SEQ ID NO: 528 - DNA, 80 bp, synthetic construct
  misc_feature 1..80: note = Synthetic: DF0000249.4:START161:INDEX232:OBS1
  source 1..80: mol_type = other DNA
ggcttggacggtaaattgcggttaatttcggtcaatttcagctcttagcacagtagcagctacccatcccccacccccag

SEQ ID NO: 529 - DNA, 80 bp, synthetic construct
  misc_feature 1..80: note = Synthetic: DF0000277.4:START1361:INDEX742:OBS1
  source 1..80: mol_type = other DNA
tgtatatacacgggttagtatacacacatatatttccttgctctgtcagctgagagggcctagaagcaacgacaccccag

SEQ ID NO: 530 - DNA, 80 bp, synthetic construct
  misc_feature 1..80: note = Synthetic: DF0000276.4:START1:INDEX689:OBS1
  source 1..80: mol_type = other DNA
ctggtatccaaaatatacaaagaactcttaaaactcaacaataagaaaacaaacaacccaattaaaaaatgggcaaaaga

SEQ ID NO: 531 - DNA, 80 bp, synthetic construct
  misc_feature 1..80: note = Synthetic: DF0000275.4:START1:INDEX601:OBS1
  source 1..80: mol_type = other DNA
ctgttatccaaaatatacaaagaactcttaaaactcaacaataagaaaacgaacaacccgattaaaaaatgggccaaaga

SEQ ID NO: 532 - DNA, 80 bp, synthetic construct
  misc_feature 1..80: note = Synthetic: DF0000284.4:START881:INDEX188:OBS1
  source 1..80: mol_type = other DNA
gactgaggctggaccaggacaacagagaacgtccctactcccaccacaagcctaacaagcaccgagtaacaaagcaacag

SEQ ID NO: 533 - DNA, 80 bp, synthetic construct
  misc_feature 1..80: note = Synthetic: DF0000014.4:START1:INDEX252:OBS1
  source 1..80: mol_type = other DNA
ctatctgagaaactgctttgtgatgtgtgcattcatctcacagagttaaacctttcttttgattcagcagtttggaaaca

SEQ ID NO: 534 - DNA, 80 bp, synthetic construct
  misc_feature 1..80: note = Synthetic: DF0000320.4:START641:INDEX217:OBS1
  source 1..80: mol_type = other DNA
tcagcaaatgcaaaagaacggaaatcataacaaacagtctctcagaccacagtgcaatcaaattagaactcaggattaag

SEQ ID NO: 535 - DNA, 80 bp, synthetic construct
  misc_feature 1..80: note = Synthetic: DF0000282.4:START1841:INDEX32:OBS1
  source 1..80: mol_type = other DNA
cttaattgatctaacagataacagtttgttcaaaataataatagcaacaatgtattcgattatgtatgcttatgtatata

SEQ ID NO: 536 - DNA, 80 bp, synthetic construct
  misc_feature 1..80: note = Synthetic: DF0000318.4:START881:INDEX698:OBS1
  source 1..80: mol_type = other DNA
tcagcagacttaaacgttcctgcctgccggctctgaagagagcagcggatctcccagcacagcgctcgagctctgctaag

SEQ ID NO: 537 - DNA, 80 bp, synthetic construct
  misc_feature 1..80: note = Synthetic: DF0000245.4:START1921:INDEX823:OBS1
  source 1..80: mol_type = other DNA
cttcaaaaatgaaggagaaattaagacattcccagataaacaaaaactgagagaattcgtcgctagcagacctgccctac

SEQ ID NO: 538 - DNA, 80 bp, synthetic construct
  misc_feature 1..80: note = Synthetic: DF0000285.4:START2001:INDEX504:OBS1
  source 1..80: mol_type = other DNA
tttcaacatcgtactggaagtcctagctaatgcaataagacaagaaaaggaaataaaaggtatacagattgggaaggaag

SEQ ID NO: 539 - DNA, 80 bp, synthetic construct
  misc_feature 1..80: note = Synthetic: DF0000282.4:START1521:INDEX95:OBS1
  source 1..80: mol_type = other DNA
cttctcctcagaaaccatgcaagcaagaagagagtggagtgaaatatttaaagtgttgagagaaaaaaaccccaccaacc

SEQ ID NO: 540 - DNA, 80 bp, synthetic construct
  misc_feature 1..80: note = Synthetic: DF0000250.4:START401:INDEX246:OBS1
  source 1..80: mol_type = other DNA
gagaaatagacaattcaacaataatagttggagacttcaataccccactttcaataatggatagaacaactagacagaag

SEQ ID NO: 541 - DNA, 80 bp, synthetic construct
  misc_feature 1..80: note = Synthetic: DF0000248.4:START81:INDEX537:OBS1
  source 1..80: mol_type = other DNA
ttattttaaaaaaacaaccatttaaagtctctggaaattgtcctaagggcatacagcaaatgaagaaacatttattcaag

SEQ ID NO: 542 - DNA, 80 bp, synthetic construct
  misc_feature 1..80: note = Synthetic: DF0000280.4:START2001:INDEX687:OBS1
  source 1..80: mol_type = other DNA
ttatgtgcctcctgatggaagaacacaacaccacctatgaagtagtcttgccaaaaaaatcgaacctgaatctgatcaag

SEQ ID NO: 543 - DNA, 80 bp, synthetic construct
  misc_feature 1..80: note = Synthetic: DF0000283.4:START81:INDEX90:OBS1
  source 1..80: mol_type = other DNA
cttggacccatcagagaactgaggtcgcagggcaaaccgccaccccgaaatctggagagacaggcgaatacagagaatca

SEQ ID NO: 544 - DNA, 80 bp, synthetic construct
  misc_feature 1..80: note = Synthetic: DF0000246.4:START161:INDEX20:OBS1
  source 1..80: mol_type = other DNA
gctagaacttcgggtaagaacagtgggagtctgtggcattcttgcctggggctgctcccatcccacccctccaccccaag

SEQ ID NO: 545 - DNA, 80 bp, synthetic construct
  misc_feature 1..80: note = Synthetic: DF0000277.4:START1:INDEX713:OBS1
  source 1..80: mol_type = other DNA
cttgtatccaaaatatacaaagaactcttaaaactcaacaataagaaaacaaacaacccaattaaaaaatgggcaaaaga

SEQ ID NO: 546 - DNA, 80 bp, synthetic construct
  misc_feature 1..80: note = Synthetic: DF0000359.4:START241:INDEX908:OBS1
  source 1..80: mol_type = other DNA
gccttccctgaccaccctatttaaaatagcacaccctcacccccaacactccctatcccccttaccctgctttatttttc

SEQ ID NO: 547 - DNA, 80 bp, synthetic construct
  misc_feature 1..80: note = Synthetic: DF0000318.4:START1:INDEX60:OBS1
  source 1..80: mol_type = other DNA
ggtggctggcaagatggccgaataggaacagctccggtctgcagctcccagcgagatcaacgcagaaggcgggtgatttc

SEQ ID NO: 548 - DNA, 80 bp, synthetic construct
  misc_feature 1..80: note = Synthetic: DF0000276.4:START1012:INDEX145:OBS1
  source 1..80: mol_type = other DNA
gaactctctgtactttctgctcaatttttctgtaaacctaaaactgctctaaaaaataaagtctattaattttttaaaaa

SEQ ID NO: 549 - DNA, 80 bp, synthetic construct
  misc_feature 1..80: note = Synthetic: DF0000280.4:START2401:INDEX819:OBS1
  source 1..80: mol_type = other DNA
gaattattgttaattttttaggtgtgataatggtattgtggttatgtttttaaaaagagtccttatcttttagagataca

SEQ ID NO: 550 - DNA, 80 bp, synthetic construct
  misc_feature 1..80: note = Synthetic: DF0000282.4:START1441:INDEX876:OBS1
  source 1..80: mol_type = other DNA
gacaaagaaaaaatcttgaaagaagccagagggaaaaaacaccttacctatagaggagcaaagataagaattacatcaga

SEQ ID NO: 551 - DNA, 80 bp, synthetic construct
  misc_feature 1..80: note = Synthetic: DF0000360.4:START241:INDEX456:OBS1
  source 1..80: mol_type = other DNA
tccctgaccccccaggccgggtcaggcgccctcctctgggcccccccagtcctaccctgccactctgggttataattgtc

SEQ ID NO: 552 - DNA, 80 bp, synthetic construct
  misc_feature 1..80: note = Synthetic: DF0000279.4:START1361:INDEX733:OBS1
  source 1..80: mol_type = other DNA
gatagatagatacagaaataagatatagatgtatgtgtatgcatgggttagtatacatacatatatttcctagctctgtc

SEQ ID NO: 553 - DNA, 80 bp, synthetic construct
  misc_feature 1..80: note = Synthetic: DF0000250.4:START2401:INDEX404:OBS1
  source 1..80: mol_type = other DNA
gacatcccatgttcatggattggaagacttaatattgttaagatggcaatactccccaaattgatctacagattcaacgc

SEQ ID NO: 554 - DNA, 80 bp, synthetic construct
  misc_feature 1..80: note = Synthetic: DF0000054.4:START81:INDEX542:OBS1
  source 1..80: mol_type = other DNA
gaccatcccggctaaaacggtgaaaccccgtctctactaaaactacaaaaaatagccgggcgtagtggcgggcgcctgta

SEQ ID NO: 555 - DNA, 80 bp, synthetic construct
  misc_feature 1..80: note = Synthetic: DF0000037.4:START81:INDEX470:OBS1
  source 1..80: mol_type = other DNA
gaccatcctggccaacatggtgaaaccccgtctctactaaaaatacaaaaattagctgggcgtggtggcgcgtgcctgta

SEQ ID NO: 556 - DNA, 80 bp, synthetic construct
  misc_feature 1..80: note = Synthetic: DF0000247.4:START161:INDEX550:OBS1
  source 1..80: mol_type = other DNA
tactgaacctcgggtaagaacagtgggagtctgtggcgttttagcctggggctgctcccatcccccaccccagctccgtc

SEQ ID NO: 557 - DNA, 80 bp, synthetic construct
  misc_feature 1..80: note = Synthetic: DF0000282.4:START1:INDEX891:OBS1
  source 1..80: mol_type = other DNA
gacttccggtttccggtccggcatgtaaggagcttggaagtcgccactccgtcctaacaacaagtaaaaagctgaacaaa

SEQ ID NO: 558 - DNA, 80 bp, synthetic construct
  misc_feature 1..80: note = Synthetic: DF0000008.4:START401:INDEX753:OBS1
  source 1..80: mol_type = other DNA
gagaaatagacaaatccacaattatagtaggagattttaacacacctctctcagtaattgatagaacaagtagacaaaaa

SEQ ID NO: 559 - DNA, 80 bp, synthetic construct
  misc_feature 1..80: note = Synthetic: DF0000285.4:START401:INDEX244:OBS1
  source 1..80: mol_type = other DNA
gagaaatagacgaatccactattatagttggagacttcaacacccctctatcagaaatagacagatccagcaggcagaaa

SEQ ID NO: 560 - DNA, 80 bp, synthetic construct
  misc_feature 1..80: note = Synthetic: DF0000320.4:START401:INDEX609:OBS1
  source 1..80: mol_type = other DNA
gagacttagactcccacacaataatagtgggagactttaacaccccactgtcaatattagacagatcaacgagacagaaa

SEQ ID NO: 561 - DNA, 80 bp, synthetic construct
  misc_feature 1..80: note = Synthetic: DF0000319.4:START1041:INDEX882:OBS1
  source 1..80: mol_type = other DNA
tgcccctcgaggtcagaggtcccagaagaaggagcaggcacccatctttgctgttctccagcctccttgagtgacatctc

SEQ ID NO: 562 - DNA, 80 bp, synthetic construct
  misc_feature 1..80: note = Synthetic: DF0001198.2:START1201:INDEX768:OBS1
  source 1..80: mol_type = other DNA
ttgtctggttttaagaaacttttaatcccttaccttaagaagccttgtcagtgtaaaaagaaccgaaattgtgactgctc

SEQ ID NO: 563 - DNA, 80 bp, synthetic construct
  misc_feature 1..80: note = Synthetic: DF0000283.4:START481:INDEX712:OBS1
  source 1..80: mol_type = other DNA
gagccttatcccagcttaggggaagggaaattacccaactccagccccctctagccttcctgtctcacctaaggggagaa

SEQ ID NO: 564 - DNA, 80 bp, synthetic construct
  misc_feature 1..80: note = Synthetic: DF0000318.4:START641:INDEX205:OBS1
  source 1..80: mol_type = other DNA
gaggcttgagtaggcggttttcccctcacagtgtaaacaaagccgccgggaagttcgaactgggcggagcccaccgcagc

SEQ ID NO: 565 - DNA, 80 bp, synthetic construct
  misc_feature 1..80: note = Synthetic: DF0000281.4:START2321:INDEX323:OBS1
  source 1..80: mol_type = other DNA
gagggaaggagaacctatagattaaaagagacttaagagacataacaaccaaatgcaatgtgtggaccttgtttggatcc

SEQ ID NO: 566 - DNA, 80 bp, synthetic construct
  misc_feature 1..80: note = Synthetic: DF0000246.4:START2241:INDEX22:OBS1
  source 1..80: mol_type = other DNA
gataagttaaagatgcatattgtaatccctagagcaaccactaagaaaataactcaaaaaatatagctaaaaaatcaaca

SEQ ID NO: 567 - DNA, 80 bp, synthetic construct
  misc_feature 1..80: note = Synthetic: DF0000360.4:START321:INDEX378:OBS1
  source 1..80: mol_type = other DNA
tgattacatgtctgtctcccccactagactgtgagctccgtgagggcagggaccgagtctgtcttgttcaccgctgtatc

SEQ ID NO: 568 - DNA, 80 bp, synthetic construct
  misc_feature 1..80: note = Synthetic: DF0000008.4:START2401:INDEX339:OBS1
  source 1..80: mol_type = other DNA
gatataccatgttcatggattggaagactcaatattgtaaagatgtcaattctccccaaattgatctatagattcaatgc

SEQ ID NO: 569 - DNA, 80 bp, synthetic construct
  misc_feature 1..80: note = Synthetic: DF0000249.4:START1521:INDEX841:OBS1
  source 1..80: mol_type = other DNA
gattatcagcggatttctcaacagaaaccttgaaggccagaaggcagtgggatgatatattcaaagtgctgaaagaaaaa

SEQ ID NO: 570 - DNA, 80 bp, synthetic construct
  misc_feature 1..80: note = Synthetic: DF0000318.4:START1361:INDEX759:OBS1
  source 1..80: mol_type = other DNA
gcaaaaaggctgaaaattccaaaaaccagaacgcctcttctcctccaaaggatcacaactcctcgccagcaagggaacaa

SEQ ID NO: 571 - DNA, 80 bp, synthetic construct
  misc_feature 1..80: note = Synthetic: DF0000285.4:START3121:INDEX284:OBS1
  source 1..80: mol_type = other DNA
gcaaaagacatatctgataaaggactgttatccaaaatatacaaagaactcttaaaactcaacaataagaaaacaaacaa

SEQ ID NO: 572 - DNA, 80 bp, synthetic construct
  misc_feature 1..80: note = Synthetic: DF0000250.4:START3121:INDEX927:OBS1
  source 1..80: mol_type = other DNA
gcaaatcatatatctgataagggactagtatccagaatatataaagaactcttacaactcaacaataaaaagacaaataa

SEQ ID NO: 573 - DNA, 80 bp, synthetic construct
  misc_feature 1..80: note = Synthetic: DF0000008.4:START3121:INDEX748:OBS1
  source 1..80: mol_type = other DNA
gcaaaacatatatctgacaaaggactcgtatccagaatatataaagaactcctacaaatcaataaaaaaaagacaaacaa

SEQ ID NO: 574 - DNA, 80 bp, synthetic construct
  misc_feature 1..80: note = Synthetic: DF0000320.4:START3121:INDEX666:OBS1
  source 1..80: mol_type = other DNA
gcaatctatccatctgacaaagggctaatatccagaatctacaaggaacttaaacaaatttacaagaaaaaaacaaacaa

SEQ ID NO: 575 - DNA, 80 bp, synthetic construct
  misc_feature 1..80: note = Synthetic: DF0000976.4:START161:INDEX422:OBS1
  source 1..80: mol_type = other DNA
tgccctgcctacctcacagggttgttgtgaggatcaaatgagataatgtatgtgaaagcgctttgtaaactgtaaagtgc

SEQ ID NO: 576 - DNA, 80 bp, synthetic construct
  misc_feature 1..80: note = Synthetic: DF0000318.4:START161:INDEX522:OBS1
  source 1..80: mol_type = other DNA
gcagggtggggcgtcgcctcacccgggaagcgcaaggggtcggggaactccctcccctagccaagggaagccgtgaggga

SEQ ID NO: 577 - DNA, 80 bp, synthetic construct
  misc_feature 1..80: note = Synthetic: DF0000249.4:START481:INDEX562:OBS1
  source 1..80: mol_type = other DNA
gccggcgccctttctccccttcatttttcttttttccccttttgggagccagacattaaagactaggacattcaaaagca

SEQ ID NO: 578 - DNA, 80 bp, synthetic construct
  misc_feature 1..80: note = Synthetic: DF0000320.4:START81:INDEX181:OBS1
  source 1..80: mol_type = other DNA
ggcaaattggataaagagtcaagacccatcggtgtgctgtattcaggagacccatctcacgtgcaaagacacacataggc

SEQ ID NO: 579 - DNA, 80 bp, synthetic construct
  misc_feature 1..80: note = Synthetic: DF0000281.4:START2081:INDEX647:OBS1
  source 1..80: mol_type = other DNA
gcctcctgatgtgatgcaataggaagtacacagcaccacctatgaagtattcttgccaaaaaaatcgaacctgaatctaa

SEQ ID NO: 580 - DNA, 80 bp, synthetic construct
  misc_feature 1..80: note = Synthetic: DF0000249.4:START1761:INDEX268:OBS1
  source 1..80: mol_type = other DNA
gctagacagtaacacgaagccgtatgaagaaataaagatctcagtaaaggtaaatacatgggcaaatataaaagctagta

SEQ ID NO: 581 - DNA, 80 bp, synthetic construct
  misc_feature 1..80: note = Synthetic: DF0000318.4:START1601:INDEX781:OBS1
  source 1..80: mol_type = other DNA
tagagaagaacataaatgacctgatggagctgaaaaacacagcacgagaacttcgtgaagcatacacaagtatcaatagc

SEQ ID NO: 582 - DNA, 80 bp, synthetic construct
  misc_feature 1..80: note = Synthetic: DF0000284.4:START561:INDEX888:OBS1
  source 1..80: mol_type = other DNA
gctggggagaggggcagcaaaccctatcgcccccagggccaaggcaaagacactatagcttctagggaagaggtaggagc

SEQ ID NO: 583 - DNA, 80 bp, synthetic construct
  misc_feature 1..80: note = Synthetic: DF0000318.4:START721:INDEX233:OBS1
  source 1..80: mol_type = other DNA
tcggcaaagccgctgtagccagactgcctctctagattcctcctctctgggcagggcatctctgaaagaaaggcagcagc

SEQ ID NO: 584 - DNA, 80 bp, synthetic construct
  misc_feature 1..80: note = Synthetic: DF0000247.4:START2081:INDEX578:OBS1
  source 1..80: mol_type = other DNA
taaatataaaagactatataaatatattttttctcatttcttctcttaacttctttaaaagacataagattgcataaagc

SEQ ID NO: 585 - DNA, 80 bp, synthetic construct
  misc_feature 1..80: note = Synthetic: DF0000010.4:START1041:INDEX961:OBS1
  source 1..80: mol_type = other DNA
ggaaaaaggagctgacctaagtaactttggaaatgagtggaaactgtaaggctaaagacaaaaagaactgtaaacaaaca

SEQ ID NO: 586 - DNA, 80 bp, synthetic construct
  misc_feature 1..80: note = Synthetic: DF0000282.4:START2001:INDEX767:OBS1
  source 1..80: mol_type = other DNA
ggaattaggaatattttgttattataaggtactcgcactacccgtgaagcggtatagtgttatttgaaagtggacttgga

SEQ ID NO: 587 - DNA, 80 bp, synthetic construct
  misc_feature 1..80: note = Synthetic: DF0000248.4:START321:INDEX389:OBS1
  source 1..80: mol_type = other DNA
ggctacggtatctccccgggaggggcaggccgccagcatttctcatcccccccagctccgtgttgcagaggctaaattcc

SEQ ID NO: 588 - DNA, 80 bp, synthetic construct
  misc_feature 1..80: note = Synthetic: DF0000318.4:START961:INDEX538:OBS1
  source 1..80: mol_type = other DNA
ggacagactgcctcctcaagtgggtccctgacccccgtgcctcctgactgggagacacctcccagcaggggtcgacagac

SEQ ID NO: 589 - DNA, 80 bp, synthetic construct
  misc_feature 1..80: note = Synthetic: DF0001072.4:START161:INDEX419:OBS1
  source 1..80: mol_type = other DNA
tgcgattgcaggcacgcgccgccacgcctgactggttttggtggagacggggtttcgctgtgttggccgggccggtctcc

SEQ ID NO: 590 - DNA, 80 bp, synthetic construct
  misc_feature 1..80: note = Synthetic: DF0000245.4:START321:INDEX399:OBS1
  source 1..80: mol_type = other DNA
ggagctcctccaaagccccattcccagagaattgtcattatttgacctgtctggcggttccctggaagaccccactcgca

SEQ ID NO: 591 - DNA, 80 bp, synthetic construct
  misc_feature 1..80: note = Synthetic: DF0000041.4:START1:INDEX924:OBS1
  source 1..80: mol_type = other DNA
ggccgggcgcggtggctcacgcctgtaatcccagcactttgggaggccgaggcgggtggatcacgaggtcaggagttcaa

SEQ ID NO: 592 - DNA, 80 bp, synthetic construct
  misc_feature 1..80: note = Synthetic: DF0000010.4:START1441:INDEX923:OBS1
  source 1..80: mol_type = other DNA
gtacatatatttcctagctctgtccgctgagagggcctagaagcaatgacaccccagtagcaatgagcacacctagcgcc

SEQ ID NO: 593 - DNA, 80 bp, synthetic construct
  misc_feature 1..80: note = Synthetic: DF0000064.4:START1:INDEX260:OBS1
  source 1..80: mol_type = other DNA
ggctgggcgcggtggctcacgcctgtaatcccagcactttgggaggccgaggcgggcggatcacaaggtcaggagatcga

SEQ ID NO: 594 - DNA, 80 bp, synthetic construct
  misc_feature 1..80: note = Synthetic: DF0000283.4:START401:INDEX854:OBS1
  source 1..80: mol_type = other DNA
gggaaaagtaaccattatgaaatacgcccagagcgttctccataacaaagacctgccctacaggggaaaaaactttacca

SEQ ID NO: 595 - DNA, 80 bp, synthetic construct
  misc_feature 1..80: note = Synthetic: DF0000010.4:START161:INDEX719:OBS1
  source 1..80: mol_type = other DNA
gggaaatgcaaattaaaaccacaatgagataccactacacacctattagaatggctaaaatcaaaaaaactgacaatacc

SEQ ID NO: 596 - DNA, 80 bp, synthetic construct
  misc_feature 1..80: note = Synthetic: DF0000277.4:START161:INDEX821:OBS1
  source 1..80: mol_type = other DNA
gggaattgcaaattaaaacaacaatgagataccactacacacctattagaatggctaaaatccaaaaaactgacaatacc

SEQ ID NO: 597 - DNA, 80 bp, synthetic construct
  misc_feature 1..80: note = Synthetic: DF0000280.4:START801:INDEX878:OBS1
  source 1..80: mol_type = other DNA
gggacagggatagaagctagacttctttgaatataccttgttttgtagatttgactttggaaccatgtaaatattttaca

SEQ ID NO: 598 - DNA, 80 bp, synthetic construct
  misc_feature 1..80: note = Synthetic: DF0000281.4:START801:INDEX411:OBS1
  source 1..80: mol_type = other DNA
gggacagggatggaagcaagacttctctgaatgtaccttgttttatagttttgactttggaaccatgtaaatgttttaca

SEQ ID NO: 599 - DNA, 80 bp, synthetic construct
  misc_feature 1..80: note = Synthetic: DF0000248.4:START2561:INDEX281:OBS1
  source 1..80: mol_type = other DNA
gggagcaaagctgtattggagtaaggaaatgacaccagatggtaactcgaatccacaggaacaaatgaagagaaccagaa

SEQ ID NO: 600 - DNA, 80 bp, synthetic construct
  misc_feature 1..80: note = Synthetic: DF0000280.4:START1201:INDEX803:OBS1
  source 1..80: mol_type = other DNA
gggattttcggcgtgggagaaaggagatacagatgtaagatcgatgaggttaagtaaaaaccctgtagtcctgaatttga

SEQ ID NO: 601 - DNA, 80 bp, synthetic construct
  misc_feature 1..80: note = Synthetic: DF0000016.4:START81:INDEX294:OBS1
  source 1..80: mol_type = other DNA
gggctgtagtgcgctatgccgatcgggtgtccgcactaagttcggcatcaatatggtgacctcccgggagcgggggacca

SEQ ID NO: 602 - DNA, 80 bp, synthetic construct
  misc_feature 1..80: note = Synthetic: DF0000319.4:START801:INDEX790:OBS1
  source 1..80: mol_type = other DNA
ggggaggggtggccgcagtctctgcggaccagcagacttagcctttcctcctggtagttctgaggaatccgggcagccca

SEQ ID NO: 603 - DNA, 80 bp, synthetic construct
  misc_feature 1..80: note = Synthetic: DF0000319.4:START1:INDEX834:OBS1
  source 1..80: mol_type = other DNA
ggggggcggggccaagatggccgactagaagcagcggcgatcggaggctcccatcgaaaagaaccataataagcgtgtga

SEQ ID NO: 604 - DNA, 80 bp, synthetic construct
  misc_feature 1..80: note = Synthetic: DF0000246.4:START2001:INDEX167:OBS1
  source 1..80: mol_type = other DNA
gggtaaatataaaagactgtataaatatattttttctcttttcttctcttaatttctttaaaagacataagattgtttaa

SEQ ID NO: 605 - DNA, 80 bp, synthetic construct
  misc_feature 1..80: note = Synthetic: DF0000245.4:START1:INDEX814:OBS1
  source 1..80: mol_type = other DNA
gggtgacgtcagcgaaaatggcggagtaaggacctccgaaaatccactcctccataaaagcaacgagaacactggcaaaa

SEQ ID NO: 606 - DNA, 80 bp, synthetic construct
  misc_feature 1..80: note = Synthetic: DF0000281.4:START2698:INDEX624:OBS1
  source 1..80: mol_type = other DNA
ggtacatgggggttcattatactattctctctacttttgtgtatgtttgaaaatttccataataaaaagttaaaaaaaaa

SEQ ID NO: 607 - DNA, 80 bp, synthetic construct
  misc_feature 1..80: note = Synthetic: DF0001198.2:START1281:INDEX127:OBS1
  source 1..80: mol_type = other DNA
ggtgttgtctgctattttagactgagtgtcctgcgttatattgtttgtgcggtactgaagtatgctggagtaaaattgta

SEQ ID NO: 608 - DNA, 80 bp, synthetic construct
  misc_feature 1..80: note = Synthetic: DF0000281.4:START1121:INDEX64:OBS1
  source 1..80: mol_type = other DNA
tggtattgttattttgaaactattatatgtatattgtaggataaagcaaataagtaattatgttaatgtcgttaggaacc

SEQ ID NO: 609 - DNA, 80 bp, synthetic construct
  misc_feature 1..80: note = Synthetic: DF0000280.4:START1121:INDEX381:OBS1
  source 1..80: mol_type = other DNA
tggtattgttattctgagactgttgtgtgtgtattgtgggataaagcaaatgagtaattatgttggtgtcgttgagaacc

SEQ ID NO: 610 - DNA, 80 bp, synthetic construct
  misc_feature 1..80: note = Synthetic: DF0000278.4:START1601:INDEX44:OBS1
  source 1..80: mol_type = other DNA
ttttatatccagccaagctgtccttcaagtatcaaggctatagaaaaacagttttaaacatgcaagaactcagggaatac

SEQ ID NO: 611 - DNA, 80 bp, synthetic construct
  misc_feature 1..80: note = Synthetic: DF0000278.4:START2401:INDEX113:OBS1
  source 1..80: mol_type = other DNA
ttaatatcagacaaagtagaattcaagacaaaaagcattaaaagagacaaagaaggacattttataatgataaaggaaac

SEQ ID NO: 612 - DNA, 80 bp, synthetic construct
  misc_feature 1..80: note = Synthetic: DF0000282.4:START241:INDEX74:OBS1
  source 1..80: mol_type = other DNA
gtaggaaaacctgaactgtaattgacgaattgctggaggctcagtgtggacaagtctgagagttaaaaactccaggggga

SEQ ID NO: 613 - DNA, 80 bp, synthetic construct
  misc_feature 1..80: note = Synthetic: DF0000278.4:START1:INDEX454:OBS1
  source 1..80: mol_type = other DNA
tagaggggacttccgggtagctgaagacaatggcggccgcctagatacccgtctcccaatatttcctccaaaaacgatac

SEQ ID NO: 614 - DNA, 80 bp, synthetic construct
  misc_feature 1..80: note = Synthetic: DF0000245.4:START2241:INDEX543:OBS1
  source 1..80: mol_type = other DNA
gtatgacaataacagcacaaaggaggggggagggaacggagctatataggagcaaagtttttgtatactattgaaattaa

SEQ ID NO: 615 - DNA, 80 bp, synthetic construct
  misc_feature 1..80: note = Synthetic: DF0000249.4:START1441:INDEX715:OBS1
  source 1..80: mol_type = other DNA
gtcgaaagtcaaagacaaagagagaatcttgaaagcagcaagagaaaagcgactcgtcacatacaagggatcctcaataa

SEQ ID NO: 616 - DNA, 80 bp, synthetic construct
  misc_feature 1..80: note = Synthetic: DF0000279.4:START2001:INDEX447:OBS1
  source 1..80: mol_type = other DNA
gtctcaaagtatctcccccaagatatttattaattacaaagggaaaaatagtaactttacagtggagaaacccggcagac

SEQ ID NO: 617 - DNA, 80 bp, synthetic construct
  misc_feature 1..80: note = Synthetic: DF0000285.4:START161:INDEX426:OBS1
  source 1..80: mol_type = other DNA
taaaagtaaaaggatggagaaagatataccatgctaacactaatcaaaagaaagcaggagtagctatattaatttcagac

SEQ ID NO: 618 - DNA, 80 bp, synthetic construct
  misc_feature 1..80: note = Synthetic: DF0000250.4:START161:INDEX728:OBS1
  source 1..80: mol_type = other DNA
tgaaagtaaaaggatggaaaaagatataccatgcaaacagtaaccaaaagagagctggagtggctatactaatatcagac

SEQ ID NO: 619 - DNA, 80 bp, synthetic construct
  misc_feature 1..80: note = Synthetic: DF0000279.4:START2161:INDEX502:OBS1
  source 1..80: mol_type = other DNA
tgagaagggcacaacatcacttctgtggtattcttgccaaaaatgcataacctcaatctaatcatgagaaaacatcagac

SEQ ID NO: 620 - DNA, 80 bp, synthetic construct
  misc_feature 1..80: note = Synthetic: DF0000284.4:START321:INDEX638:OBS1
  source 1..80: mol_type = other DNA
gtgacagtttagaaaactgggagccccagacacaaggggagttcgcactcactcgcaagctcttttccacgggcctccac

SEQ ID NO: 621 - DNA, 80 bp, synthetic construct
  misc_feature 1..80: note = Synthetic: DF0000281.4:START1521:INDEX628:OBS1
  source 1..80: mol_type = other DNA
gtgccagaaagcaaggaagctatcaaagactaatggggtcgtgtcaaaaggacacaggagccaacttgaaggggctccca

SEQ ID NO: 622 - DNA, 80 bp, synthetic construct
  misc_feature 1..80: note = Synthetic: DF0000250.4:START881:INDEX599:OBS1
  source 1..80: mol_type = other DNA
tgcttagagggaaatttatagctgtaaatgcctatattaaaaaagaagaaagatctcaaatcaataacctaaccttccac

SEQ ID NO: 623 - DNA, 80 bp, synthetic construct
  misc_feature 1..80: note = Synthetic: DF0000282.4:START1201:INDEX837:OBS1
  source 1..80: mol_type = other DNA
gtgggacaactacaaaaggtgtaacatacgcgtaatgggaataccagaaggagaagaaagagagaaaggaacagaagaaa

SEQ ID NO: 624 - DNA, 80 bp, synthetic construct
  misc_feature 1..80: note = Synthetic: DF0000278.4:START1201:INDEX786:OBS1
  source 1..80: mol_type = other DNA
gtagaaatggaagacaggcaaagaaggaataacatacgtataattggagtccctgaagaagaaaaacaaaacaatggaac

SEQ ID NO: 625 - DNA, 80 bp, synthetic construct
  misc_feature 1..80: note = Synthetic: DF0000285.4:START1841:INDEX612:OBS1
  source 1..80: mol_type = other DNA
taaaaactctcagcaaactaggaatagaggggaacttcctcaacttgataaagaacatctacaaaaaacctacagctaac

SEQ ID NO: 626 - DNA, 80 bp, synthetic construct
  misc_feature 1..80: note = Synthetic: DF0000250.4:START1841:INDEX271:OBS1
  source 1..80: mol_type = other DNA
taaaaacactcaacaaactaggaatagaagggaacttcctcaacctgataaagggcatctacgaaaaacccacagctaac

SEQ ID NO: 627 - DNA, 80 bp, synthetic construct
  misc_feature 1..80: note = Synthetic: DF0000282.4:START641:INDEX319:OBS1
  source 1..80: mol_type = other DNA
gttcacagtccagaggcacaggctcactaaaagactgagacctaatcataggactatagaacgcttcccctccccccaca

SEQ ID NO: 628 - DNA, 80 bp, synthetic construct
  misc_feature 1..80: note = Synthetic: DF0000282.4:START1281:INDEX792:OBS1
  source 1..80: mol_type = other DNA
tatttgaagcaataatgactgagaatttccccaaaattaatgacagacaccaaaccacagatccaggaagctcagagaac

SEQ ID NO: 629 - DNA, 80 bp, synthetic construct
  misc_feature 1..80: note = Synthetic: DF0000245.4:START2321:INDEX910:OBS1
  source 1..80: mol_type = other DNA
gttggtattaattcgaactagattgttataaattaagatgttaattgtaatccccagggcaaccactaagaaaataacta

SEQ ID NO: 630 - DNA, 80 bp, synthetic construct
  misc_feature 1..80: note = Synthetic: DF0000284.4:START1281:INDEX691:OBS1
  source 1..80: mol_type = other DNA
tctctactgttcttctacacaaaatgtccggcattcaataaaaaattacgagacacacaaaaaaagaaagaaaaaacaac

SEQ ID NO: 631 - DNA, 80 bp, synthetic construct
  misc_feature 1..80: note = Synthetic: DF0000248.4:START721:INDEX879:OBS1
  source 1..80: mol_type = other DNA
tccgaagctctccccaaaggaactgactttatttgaaacagagtgtggggaagttcaagcctaagggcgctctcgaaaac

SEQ ID NO: 632 - DNA, 80 bp, synthetic construct
  misc_feature 1..80: note = Synthetic: DF0000284.4:START641:INDEX380:OBS1
  source 1..80: mol_type = other DNA
aaaaccatctgattctgggggaagagtagaagcaaaagccatctgcccctggggaagggcaggaaacaatcttgggccca

SEQ ID NO: 633 - DNA, 80 bp, synthetic construct
  misc_feature 1..80: note = Synthetic: DF0000277.4:START2321:INDEX307:OBS1
  source 1..80: mol_type = other DNA
taaaaactaaggaaatctgaataaagtatggactttagttaataataatgtatcaatattggttcattaattgtgacaaa

SEQ ID NO: 634 - DNA, 80 bp, synthetic construct
  misc_feature 1..80: note = Synthetic: DF0000248.4:START1841:INDEX636:OBS1
  source 1..80: mol_type = other DNA
taatgggagtaccagaaggagaggagagagagaaaggagcagaaaaaatattcgaagaaataatggctgaaaacttccca

SEQ ID NO: 635 - DNA, 80 bp, synthetic construct
  misc_feature 1..80: note = Synthetic: DF0000277.4:START881:INDEX744:OBS1
  source 1..80: mol_type = other DNA
taatgtatgcaaattttaaaaaatcatttaggaggtcgggggatcccaggatggaatgcagaatgtgacaaaaaaatcta

SEQ ID NO: 636 - DNA, 80 bp, synthetic construct
  misc_feature 1..80: note = Synthetic: DF0000248.4:START2401:INDEX770:OBS1
  source 1..80: mol_type = other DNA
taattataaaagacagtataaatgcatatttcttctcctttcttctcttaactgatttaaaaagcaattgtataaaacaa

SEQ ID NO: 637 - DNA, 80 bp, synthetic construct
  misc_feature 1..80: note = Synthetic: DF0000282.4:START801:INDEX597:OBS1
  source 1..80: mol_type = other DNA
tacaaggcatactaaaaggcaaaaaacacagtttgaagagacagagcaagcatcagaaccagactcagatatggcaggga

SEQ ID NO: 638 - DNA, 80 bp, synthetic construct
  misc_feature 1..80: note = Synthetic: DF0000285.4:START1441:INDEX933:OBS1
  source 1..80: mol_type = other DNA
taccaaacatttaaggaagaaattataccaattctctacaatctcttccagaagatagaagcagagggaatacttcctaa

SEQ ID NO: 639 - DNA, 80 bp, synthetic construct
  misc_feature 1..80: note = Synthetic: DF0000320.4:START1441:INDEX604:OBS1
  source 1..80: mol_type = other DNA
taccagaggtacaaagaggagctggtaccattccttctgaaactattccaaacaatagaaaaagagggactcctccctaa

SEQ ID NO: 640 - DNA, 80 bp, synthetic construct
  misc_feature 1..80: note = Synthetic: DF0000278.4:START1921:INDEX243:OBS1
  source 1..80: mol_type = other DNA
tagaataagctcattgattgtcgtataggcaataggtgggagtcaaaggataccattaaaaactgacaaaccagatagta

SEQ ID NO: 641 - DNA, 80 bp, synthetic construct
  misc_feature 1..80: note = Synthetic: DF0000279.4:START1841:INDEX818:OBS1
  source 1..80: mol_type = other DNA
tccttacagaagaattccaattaataaatgtagaaggaatgaaggaaatagaaaatcaccattaggcaaacaccacagta

SEQ ID NO: 642 - DNA, 80 bp, synthetic construct
  misc_feature 1..80: note = Synthetic: DF0000283.4:START641:INDEX285:OBS1
  source 1..80: mol_type = other DNA
tagaacgcttcccctcccccacaccttaccaccacatcaacagggctccagtataataacagtggattacagctgaaaga

SEQ ID NO: 643 - DNA, 80 bp, synthetic construct
  misc_feature 1..80: note = Synthetic: DF0000250.4:START1761:INDEX639:OBS1
  source 1..80: mol_type = other DNA
tagaataaaggacaaaaaccacatgatcatctcaatagacgcagaaaaagcatttgacaaaatccaacaccctttcatga

SEQ ID NO: 644 - DNA, 80 bp, synthetic construct
  misc_feature 1..80: note = Synthetic: DF0000245.4:START1281:INDEX526:OBS1
  source 1..80: mol_type = other DNA
tagagaatatcaataaagagatagaaattataaaaaagaaccaaatagaaattctggagttgaaaagtacaataactgaa

SEQ ID NO: 645 - DNA, 80 bp, synthetic construct
  misc_feature 1..80: note = Synthetic: DF0000277.4:START1441:INDEX706:OBS1
  source 1..80: mol_type = other DNA
tagcaacgagcacacctagcgcccagatcttggtttctaataccattctccaataaaaggaaccagggctccttggagaa

SEQ ID NO: 646 - DNA, 80 bp, synthetic construct
  misc_feature 1..80: note = Synthetic: DF0000276.4:START801:INDEX757:OBS1
  source 1..80: mol_type = other DNA
tatgatactgtaatggtggatacatgacattatacatttgtcaaaacccatagaatgtacaacacaaagagtgaacccta

SEQ ID NO: 647 - DNA, 80 bp, synthetic construct
  misc_feature 1..80: note = Synthetic: DF0000249.4:START2241:INDEX313:OBS1
  source 1..80: mol_type = other DNA
tcaaaacgtatcactacaaaaaaatcaactaaacacaaaggaagacagtaaagaaggaaatgagggacaaaaaagctata

SEQ ID NO: 648 - DNA, 80 bp, synthetic construct
  misc_feature 1..80: note = Synthetic: DF0000275.4:START1001:INDEX898:OBS1
  source 1..80: mol_type = other DNA
tatatgggaaatctctgtaccttccgctcaattttgctgtgaacctaaaactgctctaaaaaataaagtctatttaaaaa

SEQ ID NO: 649 - DNA, 80 bp, synthetic construct
  misc_feature 1..80: note = Synthetic: DF0000281.4:START2401:INDEX416:OBS1
  source 1..80: mol_type = other DNA
tgattcgaacaaaccaactgtaaaaagacatttttgagacaatcggggaaatttgaacacggactgggtattagatgata

SEQ ID NO: 650 - DNA, 80 bp, synthetic construct
  misc_feature 1..80: note = Synthetic: DF0000281.4:START81:INDEX197:OBS1
  source 1..80: mol_type = other DNA
tatgaacagacagttcacagaaaaagaaatgcaaatggcccttaaacatatgaaaagatgctcaacctcactcataataa

SEQ ID NO: 651 - DNA, 80 bp, synthetic construct
  misc_feature 1..80: note = Synthetic: DF0000277.4:START2453:INDEX122:OBS1
  source 1..80: mol_type = other DNA
tatgggaactctctgtactatcttcgcaatttttctgtaaatctaaaactattctaaaataaaaagtttattttaaaaaa

SEQ ID NO: 652 - DNA, 80 bp, synthetic construct
  misc_feature 1..80: note = Synthetic: DF0000245.4:START1201:INDEX347:OBS1
  source 1..80: mol_type = other DNA
tattttaaatatgttcaaagaactaaaggaaaccatgtctaaagaactaaaggaaagtatgagaacgatgtctcaccaaa

SEQ ID NO: 653 - DNA, 80 bp, synthetic construct
  misc_feature 1..80: note = Synthetic: DF0000277.4:START1601:INDEX761:OBS1
  source 1..80: mol_type = other DNA
tcaaaaaaacccacaatgatgggggtatgtcaaagggacacaggagccaactgaaagagctcccaatggccaaagctgga

SEQ ID NO: 654 - DNA, 80 bp, synthetic construct
  misc_feature 1..80: note = Synthetic: DF0000250.4:START2881:INDEX920:OBS1
  source 1..80: mol_type = other DNA
tcaaaatggatcaaagacctaaatgtaagagctaaaactataaaactcttagaagaaaacataggagtaaatcttcgtga

SEQ ID NO: 655 - DNA, 80 bp, synthetic construct
  misc_feature 1..80: note = Synthetic: DF0000285.4:START2881:INDEX722:OBS1
  source 1..80: mol_type = other DNA
tcaaaatggatcatagacctaaatgtaaaacgcaaaactataaaactcctagaagataacataggagaaaatctagatga

SEQ ID NO: 656 - DNA, 80 bp, synthetic construct
  misc_feature 1..80: note = Synthetic: DF0000320.4:START2881:INDEX813:OBS1
  source 1..80: mol_type = other DNA
tcaagatggattaaagacttaaacgtaagacctaaaaccataaaaaccctagaagaaaacctaggcaataccattcagga

SEQ ID NO: 657 - DNA, 80 bp, synthetic construct
  misc_feature 1..80: note = Synthetic: DF0000245.4:START1521:INDEX832:OBS1
  source 1..80: mol_type = other DNA
tcaagcgtaccaacatacgcataatgggagtcccagaaggagaggagagagagaaaggggcagaaagaatatttgaagaa

SEQ ID NO: 658 - DNA, 80 bp, synthetic construct
  misc_feature 1..80: note = Synthetic: DF0000250.4:START641:INDEX739:OBS1
  source 1..80: mol_type = other DNA
tcaataaatttaaaaggattgaaatcatacaaagtatgttctccgaccacaatggaatgaaattagaaatcaataacaga

SEQ ID NO: 659 - DNA, 80 bp, synthetic construct
  misc_feature 1..80: note = Synthetic: DF0000008.4:START641:INDEX642:OBS1
  source 1..80: mol_type = other DNA
tcaataaatttaaaaggattgaaatcatacagagtatgttctctgaccacaatggaattaaattagaaatcaataacaaa

SEQ ID NO: 660 - DNA, 80 bp, synthetic construct
  misc_feature 1..80: note = Synthetic: DF0000008.4:START2881:INDEX445:OBS1
  source 1..80: mol_type = other DNA
tcaagatggatcatagacctaaatgtaaaagataaaactataaaacttctagaagaaaacataggagaatatcttcgtga

SEQ ID NO: 661 - DNA, 80 bp, synthetic construct
  misc_feature 1..80: note = Synthetic: DF0000245.4:START2561:INDEX581:OBS1
  source 1..80: mol_type = other DNA
tcagtaattacattaaatgtaaatggattaaacactccaatcaaaaggcagagattggcagaatggattaaaaaacatga

SEQ ID NO: 662 - DNA, 80 bp, synthetic construct
  misc_feature 1..80: note = Synthetic: DF0000279.4:START881:INDEX42:OBS1
  source 1..80: mol_type = other DNA
ttagaaccatgataatgtttcacatacctcaaaaataaataattaaaatcaaccaggatgtggggggaacccaaaatgga

SEQ ID NO: 663 - DNA, 80 bp, synthetic construct
  misc_feature 1..80: note = Synthetic: DF0000284.4:START161:INDEX344:OBS1
  source 1..80: mol_type = other DNA
tgaattccaaagagagacaagcccctccaaggagagacgggacacacgaactgtttcacctttggcagagcacgggagga

SEQ ID NO: 664 - DNA, 80 bp, synthetic construct
  misc_feature 1..80: note = Synthetic: DF0000010.4:START801:INDEX136:OBS1
  source 1..80: mol_type = other DNA
tctgtataaaataatctgtatgatactgtggtggtggatacacgacactatgcatttgtcaaaacccatagaacttgtaa

SEQ ID NO: 665 - DNA, 80 bp, synthetic construct
  misc_feature 1..80: note = Synthetic: DF0000278.4:START561:INDEX701:OBS1
  source 1..80: mol_type = other DNA
ttagggtcctgcaagacaaaagagaaccacaaaatcggaggacacacaactcctccatccaccaccaaaacaaacaaaga

SEQ ID NO: 666 - DNA, 80 bp, synthetic construct
  misc_feature 1..80: note = Synthetic: DF0000281.4:START1:INDEX183:OBS1
  source 1..80: mol_type = other DNA
ttaatatccctaatatataaagagcttctaaaaattgagaagaaaaagaccaacaacccaatagaaaaatgggcaaaaga

SEQ ID NO: 667 - DNA, 80 bp, synthetic construct
  misc_feature 1..80: note = Synthetic: DF0001161.2:START161:INDEX926:OBS1
  source 1..80: mol_type = other DNA
tgttgactttaatctataaagccctatatggtttgggccctggttaccttagagatcgcctctctccctatgcaccgtca

SEQ ID NO: 668 - DNA, 80 bp, synthetic construct
  misc_feature 1..80: note = Synthetic: DF0000245.4:START1441:INDEX873:OBS1
  source 1..80: mol_type = other DNA
tgagattatccagtctgaggaacagaaagaaaaaagaatgaagaaaaatgaacagagcctaagagacctgtgggacacca

SEQ ID NO: 669 - DNA, 80 bp, synthetic construct
  misc_feature 1..80: note = Synthetic: DF0000280.4:START1921:INDEX326:OBS1
  source 1..80: mol_type = other DNA
tgcaacccctaatgaaataatggatctaggcaatgatcatcaatggctgctaacatcacaaaaagagagacaaccagaca

SEQ ID NO: 670 - DNA, 80 bp, synthetic construct
  misc_feature 1..80: note = Synthetic: DF0000318.4:START81:INDEX678:OBS1
  source 1..80: mol_type = other DNA
tgcatttccaactgaggtacccggctcatctcattgggactggttagacagtgggtgcagcccacggagggcgagccgaa

SEQ ID NO: 671 - DNA, 80 bp, synthetic construct
  misc_feature 1..80: note = Synthetic: DF0000278.4:START1681:INDEX140:OBS1
  source 1..80: mol_type = other DNA
tgtacccacgagcccttcctgaggaatctactagaggatgagcttcatccaaccaagagatgactggggaaacttcggca

SEQ ID NO: 672 - DNA, 80 bp, synthetic construct
  misc_feature 1..80: note = Synthetic: DF0000277.4:START2401:INDEX835:OBS1
  source 1..80: mol_type = other DNA
tgtaccatactaatgtaagatgttaataataggggaaactgggtgtggggtatatgggaactctctgtactatcttcgca

SEQ ID NO: 673 - DNA, 80 bp, synthetic construct
  misc_feature 1..80: note = Synthetic: DF0000277.4:START1841:INDEX627:OBS1
  source 1..80: mol_type = other DNA
tgtagatactccgccctcaaggaggtggagcataactccccactccttaagtgtgggctgcgcatagtgacttccttcca

SEQ ID NO: 674 - DNA, 80 bp, synthetic construct
  misc_feature 1..80: note = Synthetic: DF0001250.2:START1:INDEX204:OBS1
  source 1..80: mol_type = other DNA
ttaccttagagatcgcctctctccctatgcgccatcgtggcaattgagatcagccggggcgctcctgctgacggttccca

SEQ ID NO: 675 - DNA, 80 bp, synthetic construct
  misc_feature 1..80: note = Synthetic: DF0000010.4:START1121:INDEX487:OBS1
  source 1..80: mol_type = other DNA
ttgaactctagttagtaggtttgtttttcgcagaggtatgggttagcaattctgaaactactttctgtacatattataca

SEQ ID NO: 676 - DNA, 80 bp, synthetic construct
  misc_feature 1..80: note = Synthetic: DF0000320.4:START881:INDEX766:OBS1
  source 1..80: mol_type = other DNA
tgtttagagggaaatttatagcactaaatgcccacaagagaaagcgggaaagatctaaaatcgacaccctaacatcacaa

SEQ ID NO: 677 - DNA, 80 bp, synthetic construct
  misc_feature 1..80: note = Synthetic: DF0000249.4:START641:INDEX31:OBS1
  source 1..80: mol_type = other DNA
ttaagtttacacctcaggctgatcctcggcacagagacagcctacaacaataaaaacaaaacaaaaaaataacaaaaaca

SEQ ID NO: 678 - DNA, 80 bp, synthetic construct
  misc_feature 1..80: note = Synthetic: DF0000249.4:START2161:INDEX675:OBS1
  source 1..80: mol_type = other DNA
ttaggatgttaaatgtaatccccatggtaaccacaaagaaaataactatagaatatacacaaaaggaaatgagaaaggaa

SEQ ID NO: 679 - DNA, 80 bp, synthetic construct
  misc_feature 1..80: note = Synthetic: DF0000010.4:START1201:INDEX124:OBS1
  source 1..80: mol_type = other DNA
ttctaggattgagcaaataagtaaatatattgaggataatgggagccaggtttctcactgtcggagaagggagttacaaa

SEQ ID NO: 680 - DNA, 80 bp, synthetic construct
  misc_feature 1..80: note = Synthetic: DF0000248.4:START881:INDEX39:OBS1
  source 1..80: mol_type = other DNA
tttaccagagagaaccagggaaagagacagctaagaagagccctcctggggtcagaacaaacctcaaagactggcctcaa

SEQ ID NO: 681 - DNA, 80 bp, synthetic construct
  misc_feature 1..80: note = Synthetic: DF0001250.2:START293:INDEX250:OBS1
  source 1..80: mol_type = other DNA
tttaaattttgtacttgcgccctgaggcgattttatcacgaagggcgcaattttataaatcgaataaataaataaataaa

SEQ ID NO: 682 - DNA, 80 bp, synthetic construct
  misc_feature 1..80: note = Synthetic: DF0000246.4:START321:INDEX618:OBS1
  source 1..80: mol_type = other DNA
tttggagcggagggcgaaaacccacgcccagcggcgttgtcagtaaaagtggcgaactcggtaggaaacgaacggggaaa

SEQ ID NO: 683 - DNA, 80 bp, synthetic construct
  misc_feature 1..80: note = Synthetic: DF0000247.4:START2561:INDEX551:OBS1_REV
  source 1..80: mol_type = other DNA
tgtgtctcttgtagacagcatatagttggatcttgcttttttatccagtctgacaatctctgccttttgattggagtgtt

SEQ ID NO: 684 - DNA, 80 bp, synthetic construct
  misc_feature 1..80: note = Synthetic: DF0000049.4:START161:INDEX749:OBS1_REV
  source 1..80: mol_type = other DNA
gcgcgatctcggctcactgcaacctccgcctcccgggttcaagcgattctcctgcctcagcctcccgagtagctgggatt

SEQ ID NO: 685 - DNA, 80 bp, synthetic construct
  misc_feature 1..80: note = Synthetic: DF0001067.4:START1281:INDEX667:OBS1_REV
  source 1..80: mol_type = other DNA
attcttgggtgtttctcggagagggggatgtggcagggtcataggataatagtggagagaaggtcagcagataaacacgt

SEQ ID NO: 686 - DNA, 80 bp, synthetic construct
  misc_feature 1..80: note = Synthetic: DF0001316.2:START232:INDEX903:OBS1_REV
  source 1..80: mol_type = other DNA
ttttttttttttttttttttttttttttttgagacggagtctcgctctgtggcccaggtgggagtgcagtggcgcaatct

SEQ ID NO: 687 - DNA, 80 bp, synthetic construct
  misc_feature 1..80: note = Synthetic: DF0001072.4:START1201:INDEX189:OBS1_REV
  source 1..80: mol_type = other DNA
agataaacaagtgaacaaaggtctctggttttcctaggcagaggaccctgcggccttccgcagtgtttgtgtccctgatt

SEQ ID NO: 688 - DNA, 80 bp, synthetic construct
  misc_feature 1..80: note = Synthetic: DF0001072.4:START1121:INDEX506:OBS1_REV
  source 1..80: mol_type = other DNA
acttgagattagggattggtgatgactcttaacgagcatgctgccttcaagcatctgtttaacaaagcacatcttgcacc

SEQ ID NO: 689 - DNA, 80 bp, synthetic construct
  misc_feature 1..80: note = Synthetic: DF0001071.4:START1041:INDEX727:OBS1_REV
  source 1..80: mol_type = other DNA
atccatttaaccctgagtggacacagcacatgtttcagagagcacagggttggggataaggtcacagatcaacaggatcc

SEQ ID NO: 690 - DNA, 80 bp, synthetic construct
  misc_feature 1..80: note = Synthetic: DF0001068.4:START401:INDEX843:OBS1_REV
  source 1..80: mol_type = other DNA
aggcagagacgctcctcacttcccagacggggtggcggccgggcagaggctgcaatctcggcactttgggaggccaaggc

SEQ ID NO: 691 - DNA, 80 bp, synthetic construct
  misc_feature 1..80: note = Synthetic: DF0001068.4:START721:INDEX219:OBS1_REV
  source 1..80: mol_type = other DNA
aggcgccccccacctcccggacggggcggctggccgggcggggggctgttccccccacctcctcccggacggggcggctg

SEQ ID NO: 692 - DNA, 80 bp, synthetic construct
  misc_feature 1..80: note = Synthetic: DF0000250.4:START3201:INDEX622:OBS1_REV
  source 1..80: mol_type = other DNA
ttttcatgtgcttattggccatttgtatatcttctttggagaaatgtctattcaaatcctttgcccattttttaattggg

SEQ ID NO: 693 - DNA, 80 bp, synthetic construct
  misc_feature 1..80: note = Synthetic: DF0001068.4:START641:INDEX462:OBS1_REV
  source 1..80: mol_type = other DNA
gccgggcggggggctgacctcctcacctcccagacggggcggctggccgggcagaggcgctcctcacttcccagacgggg

SEQ ID NO: 694 - DNA, 80 bp, synthetic construct
  misc_feature 1..80: note = Synthetic: DF0001071.4:START481:INDEX480:OBS1_REV
  source 1..80: mol_type = other DNA
ggcggccgggcagaggcgctcctcacctcccggacggggcggccgggcagaggggctcctcacttcccggacgatgggcg

SEQ ID NO: 695 - DNA, 80 bp, synthetic construct
  misc_feature 1..80: note = Synthetic: DF0000249.4:START1601:INDEX838:OBS1_REV
  source 1..80: mol_type = other DNA
tgtttatctgggaatgtcttaatttctccctcatttttgaaggacagttttgccggatatagtattcttggttgacagtt

SEQ ID NO: 696 - DNA, 80 bp, synthetic construct
  misc_feature 1..80: note = Synthetic: DF0001070.4:START241:INDEX912:OBS2_REV
  source 1..80: mol_type = other DNA
acgagactccgtctgcaatcccggcacctcgggaggccgaggctggcggatcactcgcggttaggagctggagaccagcc

SEQ ID NO: 697 - DNA, 80 bp, synthetic construct
  misc_feature 1..80: note = Synthetic: DF0000001.4:START81:INDEX371:OBS1_REV
  source 1..80: mol_type = other DNA
aggtactattattatccccattttacagatgaggaaactgaggcacagagaggttaagtaacttgcccaaggtcacacag

SEQ ID NO: 698 - DNA, 80 bp, synthetic construct
  misc_feature 1..80: note = Synthetic: DF0000246.4:START1041:INDEX746:OBS1_REV
  source 1..80: mol_type = other DNA
ttctttgaacatatttataatagctgctttgaagtctttgtctgctaattccaacatctgggcccactcagagtcagttt

SEQ ID NO: 699 - DNA, 80 bp, synthetic construct
  misc_feature 1..80: note = Synthetic: DF0000249.4:START1281:INDEX531:OBS1_REV
  source 1..80: mol_type = other DNA
attcatgtctttcttcaaatttgggaagttttcggccattatttcttcaaatattctctctgcccctttctctctctctt

SEQ ID NO: 700 - DNA, 80 bp, synthetic construct
  misc_feature 1..80: note = Synthetic: DF0001068.4:START961:INDEX663:OBS1_REV
  source 1..80: mol_type = other DNA
aaggcagaagaatttttcttagtacagaacaaaatggagtctcctatgtctacttctttctacacagacacagtaacaat

SEQ ID NO: 701 - DNA, 80 bp, synthetic construct
  misc_feature 1..80: note = Synthetic: DF0000248.4:START1921:INDEX580:OBS1_REV
  source 1..80: mol_type = other DNA
ggtgtggatctctttgcgtttatcctacttggagttcgttgagcttcttggatgtgtagattaatgtttttcatcaaatt

SEQ ID NO: 702 - DNA, 80 bp, synthetic construct
  misc_feature 1..80: note = Synthetic: DF0000280.4:START1441:INDEX10:OBS1_REV
  source 1..80: mol_type = other DNA
acaagatgttccaggctcatcttgtacatttcctgccccagacctggaatcagccatttctccaaggagccctggttcct

SEQ ID NO: 703 - DNA, 80 bp, synthetic construct
  misc_feature 1..80: note = Synthetic: DF0000247.4:START1361:INDEX945:OBS1_REV
  source 1..80: mol_type = other DNA
ctgttcttcagattggataatttctattgatctatcttcaagttcactgattctttcttctgccatctcaaatctgctgt

SEQ ID NO: 704 - DNA, 80 bp, synthetic construct
  misc_feature 1..80: note = Synthetic: DF0000246.4:START1601:INDEX708:OBS1_REV
  source 1..80: mol_type = other DNA
gtaatgtgtcgtttttctcttgctgctttcaagattttctctttgtctttggctttcagcagtttgactatgatgtgtct

SEQ ID NO: 705 - DNA, 80 bp, synthetic construct
  misc_feature 1..80: note = Synthetic: DF0001072.4:START961:INDEX524:OBS1_REV
  source 1..80: mol_type = other DNA
aggatcccaaggcagaggaatttttcttagtgcagaacaaaatgaaaagtctcccatgtctacttctttctacacagaca

SEQ ID NO: 706 - DNA, 80 bp, synthetic construct
  misc_feature 1..80: note = Synthetic: DF0001068.4:START881:INDEX119:OBS1_REV
  source 1..80: mol_type = other DNA
ctgatctctctttcttttccccacatttcccccttttctattcgacaaaaccgccatcgtcatcatggcccgttctcaat

SEQ ID NO: 707 - DNA, 80 bp, synthetic construct
  misc_feature 1..80: note = Synthetic: DF0000246.4:START961:INDEX570:OBS1_REV
  source 1..80: mol_type = other DNA
ctattgactgctttttttcctgattatgggtcacattttcctgtttctttgcatgtcttgtaattttttgttgaaaactg

SEQ ID NO: 708 - DNA, 80 bp, synthetic construct
  misc_feature 1..80: note = Synthetic: DF0001072.4:START561:INDEX69:OBS1_REV
  source 1..80: mol_type = other DNA
ccggacggggcggccgggcggaggcgctcctcacttcccggacggtgggcggccgggcggagacgctcctcacctcccgg

SEQ ID NO: 709 - DNA, 80 bp, synthetic construct
  misc_feature 1..80: note = Synthetic: DF0000281.4:START481:INDEX734:OBS2_REV
  source 1..80: mol_type = other DNA
acagctgcatagtactccattgtgtggatgtaccatagtttattcaaccagtcccctattgatggacatttgggttgttt

SEQ ID NO: 710 - DNA, 80 bp, synthetic construct
  misc_feature 1..80: note = Synthetic: DF0000279.4:START2241:INDEX495:OBS1_REV
  source 1..80: mol_type = other DNA
ctttccttgtctttcatgaccttgacacttttgaagagtactggtcagttattttgtagaatgtccctcaatttgggttt

SEQ ID NO: 711 - DNA, 80 bp, synthetic construct
  misc_feature 1..80: note = Synthetic: DF0000248.4:START2241:INDEX853:OBS1_REV
  source 1..80: mol_type = other DNA
gaacttcctttagtatttcttgtaaggcgggtctgctagcaacaaattctctcagtttttgtttatctgggaatgtcttt

SEQ ID NO: 712 - DNA, 80 bp, synthetic construct
  misc_feature 1..80: note = Synthetic: DF0000279.4:START161:INDEX935:OBS1_REV
  source 1..80: mol_type = other DNA
gagtgtgttgtcaaacttttgaatttttgccaatctgataggtgagaaatggtatctcagtgtagttttaatttgcattt

SEQ ID NO: 713 - DNA, 80 bp, synthetic construct
  misc_feature 1..80: note = Synthetic: DF0000280.4:START1761:INDEX948:OBS1_REV
  source 1..80: mol_type = other DNA
aactatttggttaccctgaggtacagttcgtataggaaaggcaggataaatgcttgattctttccctttatttaccagtt

SEQ ID NO: 714 - DNA, 80 bp, synthetic construct
  misc_feature 1..80: note = Synthetic: DF0000247.4:START1201:INDEX218:OBS1_REV
  source 1..80: mol_type = other DNA
tctatctctttattgatattctctatttgttgagtcattgtcgtcatactttcctttaattctttaaacatggtttcctt

SEQ ID NO: 715 - DNA, 80 bp, synthetic construct
  misc_feature 1..80: note = Synthetic: DF0000247.4:START2161:INDEX107:OBS1_REV
  source 1..80: mol_type = other DNA
ccccctcctttgtgctattattgtcatatatattacatctatatatgttataaacccaacaatacagtgttataattatt

SEQ ID NO: 716 - DNA, 80 bp, synthetic construct
  misc_feature 1..80: note = Synthetic: DF0000280.4:START2561:INDEX829:OBS1_REV
  source 1..80: mol_type = other DNA
aatagtataatgaacccccatgtacccatcacccagcttcaacaattatcaactcatggccaatcttgtttcatctatac

SEQ ID NO: 717 - DNA, 80 bp, synthetic construct
  misc_feature 1..80: note = Synthetic: DF0000014.4:START93:INDEX488:OBS1_REV
  source 1..80: mol_type = other DNA
cttctttctagtttttatctgaagatattttctttttcaccataggcctcaatgtgctcccaaatatcccttcgcagatt

SEQ ID NO: 718 - DNA, 80 bp, synthetic construct
  misc_feature 1..80: note = Synthetic: DF0001071.4:START801:INDEX553:OBS1_REV
  source 1..80: mol_type = other DNA
aatgagccgctgggcacacctcccggacggggcggtggccgggcagaggggctcctcacttcccagtaggggcggccggg

SEQ ID NO: 719 - DNA, 80 bp, synthetic construct
  misc_feature 1..80: note = Synthetic: DF0000247.4:START1281:INDEX184:OBS1_REV
  source 1..80: mol_type = other DNA
tgagcccctctagtgaatttttcatttcagttattgtacttttcaactccagaatttccatttggttcttttttataatt

SEQ ID NO: 720 - DNA, 80 bp, synthetic construct
  misc_feature 1..80: note = Synthetic: DF0000246.4:START1:INDEX149:OBS1_REV
  source 1..80: mol_type = other DNA
aattttgtccagttttatatttgttttttggggagaggatttgccgacctcttcactccgccatagccggaagtcccgcc

SEQ ID NO: 721 - DNA, 80 bp, synthetic construct
  misc_feature 1..80: note = Synthetic: DF0000246.4:START2161:INDEX315:OBS1_REV
  source 1..80: mol_type = other DNA
acaatctacttcaggttaatactgacttaattccggtaaaatatagtaactttgcttcaatatagctccatttcctcccc

SEQ ID NO: 722 - DNA, 80 bp, synthetic construct
  misc_feature 1..80: note = Synthetic: DF0000248.4:START1761:INDEX806:OBS1_REV
  source 1..80: mol_type = other DNA
cgcgtatgttggtgcgcttaatggtgtcccacatttctctgaggctctgttcatttttcttcattcttttttctctctgt

SEQ ID NO: 723 - DNA, 80 bp, synthetic construct
  misc_feature 1..80: note = Synthetic: DF0001320.2:START81:INDEX889:OBS5_REV
  source 1..80: mol_type = other DNA
acaggcgcccgccaccacgcccggctaattttttgtatttttagtagagacggggtttcaccgtgttagccaggatggtc

SEQ ID NO: 724 - DNA, 80 bp, synthetic construct
  misc_feature 1..80: note = Synthetic: DF0000246.4:START1921:INDEX598:OBS1_REV
  source 1..80: mol_type = other DNA
acatatttaccatttccggtgctcttcatttcttcctgtggattcgagtttccgtctggtgtcatttcctttcagcctga

SEQ ID NO: 725 - DNA, 80 bp, synthetic construct
  misc_feature 1..80: note = Synthetic: DF0000247.4:START881:INDEX432:OBS1_REV
  source 1..80: mol_type = other DNA
gtttttgtttgtttgtttagtgacttgcctggactaattctgtgaagtctgtctcccccgcagtgtgcggccgctgatgt

SEQ ID NO: 726 - DNA, 80 bp, synthetic construct
  misc_feature 1..80: note = Synthetic: DF0000279.4:START2081:INDEX263:OBS1_REV
  source 1..80: mol_type = other DNA
gtgcatcatatcagggggtacatgatgtcgatatgtcttattactggtgatgttaaccttgatcacttggttaaggtggt

SEQ ID NO: 727 - DNA, 80 bp, synthetic construct
  misc_feature 1..80: note = Synthetic: DF0000975.4:START161:INDEX100:OBS1_REV
  source 1..80: mol_type = other DNA
ttactatgtgccaggcactgtgctaagcgctttacatgcattatctcatttaatcctcacaacaaccctgcgaggtaggt

SEQ ID NO: 728 - DNA, 80 bp, synthetic construct
  misc_feature 1..80: note = Synthetic: DF0001072.4:START481:INDEX363:OBS1_REV
  source 1..80: mol_type = other DNA
acggggcggcggccgggcggaggcgctcctcacctcccagacggggcggccgggcagaggggctcctcacttcccagacg

SEQ ID NO: 729 - DNA, 80 bp, synthetic construct
  misc_feature 1..80: note = Synthetic: DF0000280.4:START1601:INDEX353:OBS1_REV
  source 1..80: mol_type = other DNA
atttaaacatatttgatgtgtttcaatccattgcagttattatccttattgatgctcaaattgtcccatctttggccagt

SEQ ID NO: 730 - DNA, 80 bp, synthetic construct
  misc_feature 1..80: note = Synthetic: DF0000250.4:START321:INDEX558:OBS1_REV
  source 1..80: mol_type = other DNA
ccttcaattctgtcagtttttgcttcatgtattttggggctctgttgttaggtgcatatatgtttataattgttatatct

SEQ ID NO: 731 - DNA, 80 bp, synthetic construct
  misc_feature 1..80: note = Synthetic: DF0000015.4:START81:INDEX798:OBS1_REV
  source 1..80: mol_type = other DNA
agcattatatgaagaaatcccgtttccaacgaaggcctcaaagaggtccaaatatccacttgcagactttacaaacagag

SEQ ID NO: 732 - DNA, 80 bp, synthetic construct
  misc_feature 1..80: note = Synthetic: DF0001069.4:START801:INDEX688:OBS1_REV
  source 1..80: mol_type = other DNA
agctgttgggtacacctcccagacggggtggcggccgggcagaggggctcctcacttcccagaaggggcggccgggcaga

SEQ ID NO: 733 - DNA, 80 bp, synthetic construct
  misc_feature 1..80: note = Synthetic: DF0001072.4:START321:INDEX950:OBS1_REV
  source 1..80: mol_type = other DNA
aggccaaggcaggcggctgggaggtgtaggttgtagcgagccgagatcacgccactgcactccagcctgggcaccattga

SEQ ID NO: 734 - DNA, 80 bp, synthetic construct
  misc_feature 1..80: note = Synthetic: DF0001068.4:START321:INDEX125:OBS1_REV
  source 1..80: mol_type = other DNA
aggcggctgggaggtggaggttgtagcgagccgagatcacgccactgcactccagcctgggcaacattgagcactgagtg

SEQ ID NO: 735 - DNA, 80 bp, synthetic construct
  misc_feature 1..80: note = Synthetic: DF0000279.4:START2550:INDEX134:OBS1_REV
  source 1..80: mol_type = other DNA
ttttttaactttttattttgaaataattttagacttacagaaaagttgcaaaaatagtacagagagttcccgtataccct

SEQ ID NO: 736 - DNA, 80 bp, synthetic construct
  misc_feature 1..80: note = Synthetic: DF0000053.4:START161:INDEX390:OBS1_REV
  source 1..80: mol_type = other DNA
gcgggatctcggctcactgcaagctccgcctcccgggttcacgccattctcctgcctcagcctcccaagtagctgggact

SEQ ID NO: 737 - DNA, 80 bp, synthetic construct
  misc_feature 1..80: note = Synthetic: DF0000246.4:START81:INDEX325:OBS1_REV
  source 1..80: mol_type = other DNA
agtttttcatgaataaacgcttctcaatttgttgtttgcctttggtcgatttccagagccctgaaatggttgtttttgac

SEQ ID NO: 738 - DNA, 80 bp, synthetic construct
  misc_feature 1..80: note = Synthetic: DF0000247.4:START2401:INDEX479:OBS1_REV
  source 1..80: mol_type = other DNA
atgtcttttttgttcctctgttcctcctttactgccttcttttgtgttaaataaatatttttagtgtaccattttaattc

SEQ ID NO: 739 - DNA, 80 bp, synthetic construct
  misc_feature 1..80: note = Synthetic: DF0000048.4:START81:INDEX877:OBS3_REV
  source 1..80: mol_type = other DNA
caggcgcccgccaccacgcccggctaatttttgtatttttagtagagacggggtttcaccatgttggccaggctggtctc

SEQ ID NO: 740 - DNA, 80 bp, synthetic construct
  misc_feature 1..80: note = Synthetic: DF0000247.4:START1761:INDEX501:OBS1_REV
  source 1..80: mol_type = other DNA
tgaatatgtcatcccactgccttctggcctccattgtttctgatgagaagtcagccgttaatcttattgttgttcccctg

SEQ ID NO: 741 - DNA, 80 bp, synthetic construct
  misc_feature 1..80: note = Synthetic: DF0000246.4:START2401:INDEX442:OBS1_REV
  source 1..80: mol_type = other DNA
tccatttacatttaatgtaattattgatatggttggatttatgtctgccattttgctatttgttttctatttgtctcatg

SEQ ID NO: 742 - DNA, 80 bp, synthetic construct
  misc_feature 1..80: note = Synthetic: DF0000282.4:START881:INDEX116:OBS1_REV
  source 1..80: mol_type = other DNA
catgttgtctactttttccattagagcccttagcatattaatcatagttgttttaaattcccggtctgataattccaaca

SEQ ID NO: 743 - DNA, 80 bp, synthetic construct
  misc_feature 1..80: note = Synthetic: DF0000320.4:START3201:INDEX105:OBS1_REV
  source 1..80: mol_type = other DNA
ttttcatatgtttgttggccgcataaatgtcttcttttgagaagtgtctgttcatatccttcgcccactttttgatgggg

SEQ ID NO: 744 - DNA, 80 bp, synthetic construct
  misc_feature 1..80: note = Synthetic: DF0000279.4:START241:INDEX830:OBS1_REV
  source 1..80: mol_type = other DNA
cccctccataagggttgtaccattttgcattcccaccagcaatgtatgagagtgcctgtttccccacagcctcgccaaca

SEQ ID NO: 745 - DNA, 80 bp, synthetic construct
  misc_feature 1..80: note = Synthetic: DF0000285.4:START3201:INDEX223:OBS1_REV
  source 1..80: mol_type = other DNA
ttttcatatgcttatttgccatctgtatatcttctttggtgaggtgtctgttcaggtcttttgcccattttttaatcggg

SEQ ID NO: 746 - DNA, 80 bp, synthetic construct
  misc_feature 1..80: note = Synthetic: DF0000360.4:START81:INDEX375:OBS1_REV
  source 1..80: mol_type = other DNA
cgttccaggcagagggaacagcatgtgcaaaggccctgaggcgggagtgagcttggcgtgttcgaggaacagcaaggagg

SEQ ID NO: 747 - DNA, 80 bp, synthetic construct
  misc_feature 1..80: note = Synthetic: DF0000280.4:START2081:INDEX809:OBS1_REV
  source 1..80: mol_type = other DNA
ctgattgcatccccgtggtgtcgtttaacatgttcctctgtcccctgtatttcctgtaaattggtagttagatctagagg

SEQ ID NO: 748 - DNA, 80 bp, synthetic construct
  misc_feature 1..80: note = Synthetic: DF0001070.4:START561:INDEX431:OBS2_REV
  source 1..80: mol_type = other DNA
ggcggggcagaggcgctccccacatctcagacgatgggcggccgggcagagacgctcctcacttcctagacgggatggcg

SEQ ID NO: 749 - DNA, 80 bp, synthetic construct
  misc_feature 1..80: note = Synthetic: DF0000029.4:START81:INDEX764:OBS1_REV
  source 1..80: mol_type = other DNA
tttttatgtgaagatatttccttttccaccgtaggcctcaaagcgctccaaatatccacttgcagattctacaaaaagag

SEQ ID NO: 750 - DNA, 80 bp, synthetic construct
  misc_feature 1..80: note = Synthetic: DF0001198.2:START1367:INDEX658:OBS1_REV
  source 1..80: mol_type = other DNA
tttatttatttaaaattttgctcgctgggatagcctcatgagatatacatctcgttttcgtgagggtcccagggggacag

SEQ ID NO: 751 - DNA, 80 bp, synthetic construct
  misc_feature 1..80: note = Synthetic: DF0000247.4:START641:INDEX423:OBS1_REV
  source 1..80: mol_type = other DNA
gtgtgtggtttggggaacgctttcaaagttcaggcagttttcaagtctgccccggcttttactttccgccgggccctctc

SEQ ID NO: 752 - DNA, 80 bp, synthetic construct
  misc_feature 1..80: note = Synthetic: DF0000037.4:START230:INDEX783:OBS2_REV
  source 1..80: mol_type = other DNA
ttttttttttttttttttttttttttttttgagacggagtctcgctctgtcgccaggctggagtgcagtggcgcgatctc

SEQ ID NO: 753 - DNA, 80 bp, synthetic construct
  misc_feature 1..80: note = Synthetic: DF0000279.4:START1281:INDEX521:OBS1_REV
  source 1..80: mol_type = other DNA
tgtatatatgttaaaaaccatgagttcatactgatacctccgattccaatccaacaccacagggttcattctagccttcc

SEQ ID NO: 754 - DNA, 80 bp, synthetic construct
  misc_feature 1..80: note = Synthetic: DF0000010.4:START2641:INDEX928:OBS1_REV
  source 1..80: mol_type = other DNA
cttcacccagattctccaattgttaacattttgccacatttgctttatcattctctttttgcatatacatattttttttt

SEQ ID NO: 755 - DNA, 80 bp, synthetic construct
  misc_feature 1..80: note = Synthetic: DF0000284.4:START81:INDEX16:OBS1_REV
  source 1..80: mol_type = other DNA
gtttacttggttgccttgcgacctcagctctctgatgggctcaagaaaagtatgattttgtagattatccggcttttttt

SEQ ID NO: 756 - DNA, 80 bp, synthetic construct
  misc_feature 1..80: note = Synthetic: DF0000249.4:START2001:INDEX235:OBS1_REV
  source 1..80: mol_type = other DNA
ccacccctttcagttgttgatgtcacaaaattacatctttatacattgtgtgcccaaaaacataaactaataattttttt

SEQ ID NO: 757 - DNA, 80 bp, synthetic construct
  misc_feature 1..80: note = Synthetic: DF0000279.4:START721:INDEX66:OBS1_REV
  source 1..80: mol_type = other DNA
tctttctccccattcccacccaccccctgtaggtaaccaatctcattagtttctggtttatccttcctgtgtttcttttt

SEQ ID NO: 758 - DNA, 80 bp, synthetic construct
  misc_feature 1..80: note = Synthetic: DF0000277.4:START561:INDEX725:OBS1_REV
  source 1..80: mol_type = other DNA
cagactggcttctttcacttagcaatatgcatttaagattcatccatgtcttttcgtggcttgatagctcatttcttttt

SEQ ID NO: 759 - DNA, 80 bp, synthetic construct
  misc_feature 1..80: note = Synthetic: DF0000249.4:START1041:INDEX788:OBS1_REV
  source 1..80: mol_type = other DNA
ctgctcaaatctgcttttgaatccctctagtgaatttttcatttcagttattgtacttttcagctccagaatttcttttt

SEQ ID NO: 760 - DNA, 80 bp, synthetic construct
  misc_feature 1..80: note = Synthetic: DF0000283.4:START561:INDEX92:OBS1_REV
  source 1..80: mol_type = other DNA
taatcttatgattaaatctcagtcttttagtgggcctgtgtccctgggctgtgaccttcacaagtgtttcttagcttttt

SEQ ID NO: 761 - DNA, 80 bp, synthetic construct
  misc_feature 1..80: note = Synthetic: DF0000010.4:START561:INDEX596:OBS1_REV
  source 1..80: mol_type = other DNA
ttgtctggcttctttcacttagcaatatgcatttaagattcatccatgtttttgcgtgtatcagtagttcattccttttt

SEQ ID NO: 762 - DNA, 80 bp, synthetic construct
  misc_feature 1..80: note = Synthetic: DF0000281.4:START561:INDEX234:OBS1_REV
  source 1..80: mol_type = other DNA
gcaccttgcttttttcacttaacaatatatcctggagatcactccatatcagtatatagagatcttcctcattccttttt

SEQ ID NO: 763 - DNA, 80 bp, synthetic construct
  misc_feature 1..80: note = Synthetic: DF0000280.4:START561:INDEX440:OBS1_REV
  source 1..80: mol_type = other DNA
ccaccttgcttttttcacttaacaatatatcctggagatcactccatagcagtatatagagatattcctcattccttttt

SEQ ID NO: 764 - DNA, 80 bp, synthetic construct
  misc_feature 1..80: note = Synthetic: DF0000245.4:START2401:INDEX11:OBS1_REV
  source 1..80: mol_type = other DNA
actgccttcttttgtgtttaatagatattttctagtgtaccattttaattcccttttcgtttcttttactatatattttt

SEQ ID NO: 765 - DNA, 80 bp, synthetic construct
  misc_feature 1..80: note = Synthetic: DF0000282.4:START401:INDEX795:OBS1_REV
  source 1..80: mol_type = other DNA
ttaagaagaacagaatgctctggcgtatttcaaaatggttccttttcccctccccctgccggaagcacgaggggattttt

SEQ ID NO: 766 - DNA, 80 bp, synthetic construct
  misc_feature 1..80: note = Synthetic: DF0000276.4:START961:INDEX623:OBS1_REV
  source 1..80: mol_type = other DNA
aaaaattgagcagaaagtacagagagttcccatataccccctcacccctccctcacacagtttcccctattattaacatc

SEQ ID NO: 767 - DNA, 80 bp, synthetic construct
  misc_feature 1..80: note = Synthetic: DF0000320.4:START3041:INDEX528:OBS1_REV
  source 1..80: mol_type = other DNA
aaaaattttctcccattctgtaggttgcctgttcactctgatgatagtttcttttgctgtgcagaagctctttagtttaa

SEQ ID NO: 768 - DNA, 80 bp, synthetic construct
  misc_feature 1..80: note = Synthetic: DF0000320.4:START241:INDEX721:OBS1_REV
  source 1..80: mol_type = other DNA
tcttgttgcattgatccctttaccattatgtaatgcccttctttgtcttttttgatctttgttggtttaaagtctgtttt

SEQ ID NO: 769 - DNA, 80 bp, synthetic construct
  misc_feature 1..80: note = Synthetic: DF0000279.4:START561:INDEX711:OBS1_REV
  source 1..80: mol_type = other DNA
ttgcactttgcttttttcacttaacaatatatcctggaaatcactccatatcagttcatagagatcttcctcattctttt

SEQ ID NO: 770 - DNA, 80 bp, synthetic construct
  misc_feature 1..80: note = Synthetic: DF0000245.4:START561:INDEX86:OBS1_REV
  source 1..80: mol_type = other DNA
gtggccttctagattcccaggaatatgtcggagcttttcaaagccccctatggacatctcattccccagcttttcctttt

SEQ ID NO: 771 - DNA, 80 bp, synthetic construct
  misc_feature 1..80: note = Synthetic: DF0000276.4:START641:INDEX756:OBS2_REV
  source 1..80: mol_type = other DNA
cactgatctttttactgtctccatagttttgccttttccagaatgtcatatagttggaatcatacagtatgtagcctttt

SEQ ID NO: 772 - DNA, 80 bp, synthetic construct
  misc_feature 1..80: note = Synthetic: DF0000283.4:START1:INDEX936:OBS1_REV
  source 1..80: mol_type = other DNA
aaaagtcgttgatttttcagtttgttcagctttttcttgttgttgaagggagtgacgacttccaagctctttacatgtca

SEQ ID NO: 773 - DNA, 80 bp, synthetic construct
  misc_feature 1..80: note = Synthetic: DF0000250.4:START241:INDEX527:OBS1_REV
  source 1..80: mol_type = other DNA
tcctgatggattgacccttttatcattataaaatgtccttctttgtctctagtaacattttttgtcttaaagtctatttt

SEQ ID NO: 774 - DNA, 80 bp, synthetic construct
  misc_feature 1..80: note = Synthetic: DF0001250.2:START161:INDEX213:OBS1_REV
  source 1..80: mol_type = other DNA
aaaatatcaattataaaatgccaatttaaaagatgcgtcttgcaccgtgccctgaaggtcagcaaactggggctctgccg

SEQ ID NO: 775 - DNA, 80 bp, synthetic construct
  misc_feature 1..80: note = Synthetic: DF0001198.2:START481:INDEX320:OBS1_REV
  source 1..80: mol_type = other DNA
aaaatcatggttttggttttaatttcatttaaaatcgacttattggagaagaaccattcttccagcttattaaagtcgga

SEQ ID NO: 776 - DNA, 80 bp, synthetic construct
  misc_feature 1..80: note = Synthetic: DF0000248.4:START161:INDEX921:OBS1_REV
  source 1..80: mol_type = other DNA
tggggaggggggaggagggagcgggtcgtggctcaaatgccacagactctcgctgttcttaccgagatttagtagatttt

SEQ ID NO: 777 - DNA, 80 bp, synthetic construct
  misc_feature 1..80: note = Synthetic: DF0000247.4:START961:INDEX91:OBS1_REV
  source 1..80: mol_type = other DNA
ctggacattttagataatatattgtagcaactctggattctgatttttcccccctgagggttgttgttgttgttttgttt

SEQ ID NO: 778 - DNA, 80 bp, synthetic construct
  misc_feature 1..80: note = Synthetic: DF0000246.4:START881:INDEX29:OBS1_REV
  source 1..80: mol_type = other DNA
gacattttagataatatattgtagcgactctggattctgtttttttttcctgagggttgttgttgttgttttgtttgttt

SEQ ID NO: 779 - DNA, 80 bp, synthetic construct
  misc_feature 1..80: note = Synthetic: DF0000245.4:START961:INDEX881:OBS1_REV
  source 1..80: mol_type = other DNA
ggcaactctggaaatcagattctcccccctccccagggtttgttgttgttgctgtttgttgttgttgttgctgtttgttt

SEQ ID NO: 780 - DNA, 80 bp, synthetic construct
  misc_feature 1..80: note = Synthetic: DF0000010.4:START481:INDEX918:OBS1_REV
  source 1..80: mol_type = other DNA
atcgctgagtagtattccattgtatggatgtaccacagtttgtttatccattcacctgttgaaggacatcttggttgttt

SEQ ID NO: 781 - DNA, 80 bp, synthetic construct
  misc_feature 1..80: note = Synthetic: DF0000250.4:START2721:INDEX588:OBS1_REV
  source 1..80: mol_type = other DNA
tgttgaaaagactattctttccccattgaattgtcttggcacccttgtcgaaaatcaattgaccataaatgtatgggttt

SEQ ID NO: 782 - DNA, 80 bp, synthetic construct
  misc_feature 1..80: note = Synthetic: DF0000278.4:START2081:INDEX807:OBS1_REV
  source 1..80: mol_type = other DNA
tgtattatattgtattttctttgtttcatgtgatttgttttctttatttttaaaatttcttttggtatttaggaaggttt

SEQ ID NO: 783 - DNA, 80 bp, synthetic construct
  misc_feature 1..80: note = Synthetic: DF0000248.4:START961:INDEX955:OBS1_REV
  source 1..80: mol_type = other DNA
tgttttcgacaatgccctggggcataaattgctccacagtctgatccaattaaattcgggcccctttgcaggggtagttt

SEQ ID NO: 784 - DNA, 80 bp, synthetic construct
  misc_feature 1..80: note = Synthetic: DF0000275.4:START881:INDEX937:OBS1_REV
  source 1..80: mol_type = other DNA
catcccccaccagagtggtacatttgttacaatcgatgaacctacattgacacatcattatcacccaaagtccatagttt

SEQ ID NO: 785 - DNA, 80 bp, synthetic construct
  misc_feature 1..80: note = Synthetic: DF0000245.4:START1681:INDEX121:OBS1_REV
  source 1..80: mol_type = other DNA
ctgctttcaagattctctctttgtctttggctttcgacagtttgattatgatgtgtcttggtgtggatctctttgagttt

SEQ ID NO: 786 - DNA, 80 bp, synthetic construct
  misc_feature 1..80: note = Synthetic: DF0000320.4:START721:INDEX635:OBS1_REV
  source 1..80: mol_type = other DNA
ttaatttcgttatttacccagtagtcattcaggagcaggttgttcagtttccatgtagttgtgcggttttgagtgagttt

SEQ ID NO: 787 - DNA, 80 bp, synthetic construct
  misc_feature 1..80: note = Synthetic: DF0000278.4:START881:INDEX900:OBS1_REV
  source 1..80: mol_type = other DNA
tcttagtttttgaatttctgattcaaggtagtttttttttatatcctcaaatgcttgtttgagtatatttaattcagttt

SEQ ID NO: 788 - DNA, 80 bp, synthetic construct
  misc_feature 1..80: note = Synthetic: DF0000278.4:START1441:INDEX241:OBS1_REV
  source 1..80: mol_type = other DNA
aagtctgatgccagtctaattctttttcctttgtaagttatttgatctttttgcctggaggccctgaggattttttcttt

SEQ ID NO: 789 - DNA, 80 bp, synthetic construct
  misc_feature 1..80: note = Synthetic: DF0000249.4:START1681:INDEX654:OBS1_REV
  source 1..80: mol_type = other DNA
gtcctttcatttcaacctgaaggactccctttagcatttcttgtagggcaggtctagtggtaacgaactccctcagcttt

SEQ ID NO: 790 - DNA, 80 bp, synthetic construct
  misc_feature 1..80: note = Synthetic: DF0000278.4:START1761:INDEX794:OBS1_REV
  source 1..80: mol_type = other DNA
attcttccacccttgtccccactttgttttagtcttagatctacaattaaatattattaaatgctcaccatcagtccttt

SEQ ID NO: 791 - DNA, 80 bp, synthetic construct
  misc_feature 1..80: note = Synthetic: DF0000278.4:START2001:INDEX180:OBS1_REV
  source 1..80: mol_type = other DNA
gtatttttgttctagtggttacctttgtacttatacttttttataatgcccttagtccccttttttcttatttaatcttt

SEQ ID NO: 792 - DNA, 80 bp, synthetic construct
  misc_feature 1..80: note = Synthetic: DF0000008.4:START241:INDEX849:OBS1_REV
  source 1..80: mol_type = other DNA
tcttgatgaattgacccttttatcattatgaaatgtccctctttatctctggtaatatttcttgccttgaagtctacttt

SEQ ID NO: 793 - DNA, 80 bp, synthetic construct
  misc_feature 1..80: note = Synthetic: DF0000281.4:START1841:INDEX729:OBS1_REV
  source 1..80: mol_type = other DNA
gggttgcaaaatggtgattttctaattctatcattccttctgcatttattagctggaattcttctataaagaagaacttt

SEQ ID NO: 794 - DNA, 80 bp, synthetic construct
  misc_feature 1..80: note = Synthetic: DF0000008.4:START2081:INDEX904:OBS1_REV
  source 1..80: mol_type = other DNA
ttctagtagtttttttgtagattcttttggattttctacgtatacaatcatgtcatctgcgaataatgacagttttattt

SEQ ID NO: 795 - DNA, 80 bp, synthetic construct
  misc_feature 1..80: note = Synthetic: DF0000285.4:START2081:INDEX513:OBS1_REV
  source 1..80: mol_type = other DNA
ttccaggagtttttttgtcgattctttcggattttctacatagacaatcatgtcatctgcgaacaaagacagttttattt

SEQ ID NO: 796 - DNA, 80 bp, synthetic construct
  misc_feature 1..80: note = Synthetic: DF0000284.4:START1441:INDEX203:OBS1_REV
  source 1..80: mol_type = other DNA
tgctgaaatttcccatctgttcttgcatgttgtccaccttttttccactagatcctttaacatattaatcatagttattt

SEQ ID NO: 797 - DNA, 80 bp, synthetic construct
  misc_feature 1..80: note = Synthetic: DF0000280.4:START641:INDEX791:OBS1_REV
  source 1..80: mol_type = other DNA
aaatataagcaaatacgtatatttatatatttatatccccctttcttagataaacggtagcatactatacacacttttct

SEQ ID NO: 798 - DNA, 80 bp, synthetic construct
  misc_feature 1..80: note = Synthetic: DF0000285.4:START3041:INDEX500:OBS1_REV
  source 1..80: mol_type = other DNA
aaatattttctcccagtctgtggcttgtcttttcattctcttgacagtgtctttcgcagagcagaagtttttaattttaa

SEQ ID NO: 799 - DNA, 80 bp, synthetic construct
  misc_feature 1..80: note = Synthetic: DF0000008.4:START3041:INDEX564:OBS1_REV
  source 1..80: mol_type = other DNA
aaatattttctcccattctgtggcttgccttttcattttcttaacggtgtcttttgatgagcagaagtttttaattttga

SEQ ID NO: 800 - DNA, 80 bp, synthetic construct
  misc_feature 1..80: note = Synthetic: DF0000250.4:START3041:INDEX858:OBS1_REV
  source 1..80: mol_type = other DNA
aaatattttctcccattctgtgggttgtcttttcactttcttgatagtgtcctttgaagcacaaaagtttttaattttga

SEQ ID NO: 801 - DNA, 80 bp, synthetic construct
  misc_feature 1..80: note = Synthetic: DF0000250.4:START1041:INDEX190:OBS1_REV
  source 1..80: mol_type = other DNA
caattttgttgatcttttcaaagaaccaacttttggtttcgttgattttctctattgtttttctattctctatttcattt

SEQ ID NO: 802 - DNA, 80 bp, synthetic construct
  misc_feature 1..80: note = Synthetic: DF0000249.4:START1921:INDEX245:OBS1_REV
  source 1..80: mol_type = other DNA
aaatgcattagtctcttaaattatgtagaaaacaaaatgtggagttacaaaccaaagttacaataatactagcttttaga

SEQ ID NO: 803 - DNA, 80 bp, synthetic construct
  misc_feature 1..80: note = Synthetic: DF0000010.4:START241:INDEX848:OBS1_REV
  source 1..80: mol_type = other DNA
ttccaaagtggctgtaccattttgcattcccaccagcaatgtatgagagttcctgttgctccacatcctcgccagcattt

SEQ ID NO: 804 - DNA, 80 bp, synthetic construct
  misc_feature 1..80: note = Synthetic: DF0000280.4:START1841:INDEX735:OBS1_REV
  source 1..80: mol_type = other DNA
aaatggtgatattctaattctatcattccttcttcatttattagctggaatacttctataaagagaaacttcccctcatc

SEQ ID NO: 805 - DNA, 80 bp, synthetic construct
  misc_feature 1..80: note = Synthetic: DF0000245.4:START2161:INDEX847:OBS1_REV
  source 1..80: mol_type = other DNA
aaattacatctttatacattgtgtgcccatcaacacagatttataattattgctttatgcatttgtcttttaaatcatat

SEQ ID NO: 806 - DNA, 80 bp, synthetic construct
  misc_feature 1..80: note = Synthetic: DF0000249.4:START801:INDEX194:OBS1_REV
  source 1..80: mol_type = other DNA
gacagtttctgttgatttatttttttcctttgaatgggccatactttcctgtttctttgtatgccttgtgattttttgtt

SEQ ID NO: 807 - DNA, 80 bp, synthetic construct
  misc_feature 1..80: note = Synthetic: DF0000279.4:START1201:INDEX870:OBS1_REV
  source 1..80: mol_type = other DNA
ccctttccttatttgtaacttctttctccgacagtgagaaacctggctctcattatctacaatatatttacttatttgtt

SEQ ID NO: 808 - DNA, 80 bp, synthetic construct
  misc_feature 1..80: note = Synthetic: DF0000285.4:START561:INDEX386:OBS1_REV
  source 1..80: mol_type = other DNA
ggtgtgttttatggcccagaatgtggtctatcttggtgaatgttccatgtgagcttgagaagaatgtgtattctgctgtt

SEQ ID NO: 809 - DNA, 80 bp, synthetic construct
  misc_feature 1..80: note = Synthetic: DF0000010.4:START2001:INDEX36:OBS1_REV
  source 1..80: mol_type = other DNA
ctgtaaagttactattttcccctttgtaattaataagtattttgtggggagatactttgagactatgtaaatatcctgtt

SEQ ID NO: 810 - DNA, 80 bp, synthetic construct
  misc_feature 1..80: note = Synthetic: DF0000010.4:START321:INDEX646:OBS1_REV
  source 1..80: mol_type = other DNA
ttgggtaaatacctaggagtgtgattgctgggtcatatggtaattgtatgtttagctttttaagaaactgccaaactgtt

SEQ ID NO: 811 - DNA, 80 bp, synthetic construct
  misc_feature 1..80: note = Synthetic: DF0000320.4:START2401:INDEX931:OBS1_REV
  source 1..80: mol_type = other DNA
gcattgaatctataaattactttgggcagtatggccattttcacgatattgattcttcctatccatgagcatggaatgtt

SEQ ID NO: 812 - DNA, 80 bp, synthetic construct
  misc_feature 1..80: note = Synthetic: DF0001250.2:START81:INDEX750:OBS1_REV
  source 1..80: mol_type = other DNA
aaccagggcgggcagggaattccacaaacgagggccctccgcggaaaacgtcccgtcttccgctccctgcggatggaatt

SEQ ID NO: 813 - DNA, 80 bp, synthetic construct
  misc_feature 1..80: note = Synthetic: DF0000319.4:START321:INDEX907:OBS1_REV
  source 1..80: mol_type = other DNA
ttaagcagattccagctgagaggctgttgagaatctgcgcggctccggggttgggacgctaggccccggtggcgtgggtt

SEQ ID NO: 814 - DNA, 80 bp, synthetic construct
  misc_feature 1..80: note = Synthetic: DF0000320.4:START2721:INDEX433:OBS1_REV
  source 1..80: mol_type = other DNA
tattaaatagggaatcctttccccattgcttgtttttgtcaggtttgtcaaagatcagatggttgtagatgtgtggcgtt

SEQ ID NO: 815 - DNA, 80 bp, synthetic construct
  misc_feature 1..80: note = Synthetic: DF0000008.4:START561:INDEX350:OBS1_REV
  source 1..80: mol_type = other DNA
gacttgttttatggcccagtatatggtctatcttggtaaatgttccatgtgcacttgaaaagaatgtgtattctgctgtt

SEQ ID NO: 816 - DNA, 80 bp, synthetic construct
  misc_feature 1..80: note = Synthetic: DF0000318.4:START1441:INDEX716:OBS1_REV
  source 1..80: mol_type = other DNA
tttagctcggaggagtttgttattacccaccttctgaagcctacttctgtcaattcgtcaaactcattctccgtccagtt

SEQ ID NO: 817 - DNA, 80 bp, synthetic construct
  misc_feature 1..80: note = Synthetic: DF0000318.4:START1521:INDEX481:OBS1_REV
  source 1..80: mol_type = other DNA
aactggttattctagttagcaattcctctaaccttttttcaaggttcttagcttccttgcattgggttagaacatgctcc

SEQ ID NO: 818 - DNA, 80 bp, synthetic construct
  misc_feature 1..80: note = Synthetic: DF0000278.4:START1121:INDEX413:OBS1_REV
  source 1..80: mol_type = other DNA
cactttctctctgaccctttttacttctttcctttatctcattttctttattctcttgttgtttttttcctgcctttctt

SEQ ID NO: 819 - DNA, 80 bp, synthetic construct
  misc_feature 1..80: note = Synthetic: DF0000245.4:START2001:INDEX697:OBS1_REV
  source 1..80: mol_type = other DNA
tctttatttcttcatgtggattcgagttactgtctagtgtcctttcatttcagcctgaaggactccctttagcatttctt

SEQ ID NO: 820 - DNA, 80 bp, synthetic construct
  misc_feature 1..80: note = Synthetic: DF0000246.4:START1841:INDEX198:OBS1_REV
  source 1..80: mol_type = other DNA
aggacttcctttagcatttcttgtagtgcaggtctgctagcgacgaattctctcagtttttgtttatctgaaaatgtctt

SEQ ID NO: 821 - DNA, 80 bp, synthetic construct
  misc_feature 1..80: note = Synthetic: DF0000285.4:START801:INDEX492:OBS1_REV
  source 1..80: mol_type = other DNA
ctgctttcgctgcatcccacaaattttgataagttgtattttcattttcatttagttcaaaatatttttaaatttctctt

SEQ ID NO: 822 - DNA, 80 bp, synthetic construct
  misc_feature 1..80: note = Synthetic: DF0000277.4:START1921:INDEX831:OBS1_REV
  source 1..80: mol_type = other DNA
tcacctggctgaggtagtgtttgtcaggtttctccactgtaaagttactcttttttcccccctttccatactgtactctt

SEQ ID NO: 823 - DNA, 80 bp, synthetic construct
  misc_feature 1..80: note = Synthetic: DF0000279.4:START641:INDEX186:OBS1_REV
  source 1..80: mol_type = other DNA
gcacaaatgagcagatacatgtatattttcttattttcccttctttcttacacgaaaggtagcatactatatatactctt

SEQ ID NO: 824 - DNA, 80 bp, synthetic construct
  misc_feature 1..80: note = Synthetic: DF0000281.4:START401:INDEX692:OBS1_REV
  source 1..80: mol_type = other DNA
ccagtcttttgctattacaaataatgctgcaatgaataaccttgtgcatacgtcttttcgtatttttgctagtgtatctt

SEQ ID NO: 825 - DNA, 80 bp, synthetic construct
  misc_feature 1..80: note = Synthetic: DF0000285.4:START721:INDEX657:OBS1_REV
  source 1..80: mol_type = other DNA
gagatttcttctttgacccatgtgttatttagaagtgtgttgtttaatctccaagtattttgggattttccagctatctt

SEQ ID NO: 826 - DNA, 80 bp, synthetic construct
  misc_feature 1..80: note = Synthetic: DF0000008.4:START721:INDEX895:OBS1_REV
  source 1..80: mol_type = other DNA
gtgatttcttctttgacccatgggttatttagaagtgtgttgtttaatttccaaatatttggggattttctagttatctt

SEQ ID NO: 827 - DNA, 80 bp, synthetic construct
  misc_feature 1..80: note = Synthetic: DF0000281.4:START1201:INDEX196:OBS1_REV
  source 1..80: mol_type = other DNA
tcaaatttaatattacagggtttttacttaacttctttgattttatatttgtatctcttttctcttacgctgaaaatctt

SEQ ID NO: 828 - DNA, 80 bp, synthetic construct
  misc_feature 1..80: note = Synthetic: DF0000277.4:START481:INDEX954:OBS2_REV
  source 1..80: mol_type = other DNA
atcgctgaataatattccattgtatggatgtaccacagtttgtttatccattcacctattgaaggacatcttggttgctt

SEQ ID NO: 829 - DNA, 80 bp, synthetic construct
  misc_feature 1..80: note = Synthetic: DF0000248.4:START561:INDEX211:OBS1_REV
  source 1..80: mol_type = other DNA
gcccgcttctctcggagtgacacccctgctttatgagcagggcgctgggcgggggcggtagcctctggtcttctcggctt

SEQ ID NO: 830 - DNA, 80 bp, synthetic construct
  misc_feature 1..80: note = Synthetic: DF0000247.4:START801:INDEX191:OBS1_REV
  source 1..80: mol_type = other DNA
ctctgctcagttttttttttattcttgtttttatttttaagcctggcttcctaggggtcgcccctgtgtcagcatagctt

SEQ ID NO: 831 - DNA, 80 bp, synthetic construct
  misc_feature 1..80: note = Synthetic: DF0000245.4:START481:INDEX511:OBS1_REV
  source 1..80: mol_type = other DNA
aagctttttggtcagccttttgtttgccccaactgttatccaccgcctcaggcagctgcgatgttaaacaattgcctctg

SEQ ID NO: 832 - DNA, 80 bp, synthetic construct
  misc_feature 1..80: note = Synthetic: DF0000279.4:START1681:INDEX279:OBS1_REV
  source 1..80: mol_type = other DNA
ttctatgggttataatccattactatcattatttattttgttgctcaaattgttccagttttggccattgggagctcctt

SEQ ID NO: 833 - DNA, 80 bp, synthetic construct
  misc_feature 1..80: note = Synthetic: DF0000248.4:START1:INDEX356:OBS1_REV
  source 1..80: mol_type = other DNA
ttttcaccagttatggttgtttcgctggggagcgggtccgcggagctcctcacgccgccattccggaagtggaactcctt

SEQ ID NO: 834 - DNA, 80 bp, synthetic construct
  misc_feature 1..80: note = Synthetic: DF0000250.4:START801:INDEX797:OBS1_REV
  source 1..80: mol_type = other DNA
ctgcttttgctgcatcccataagttttggtatgttgtgttttcgttttcattcatctcaaagtattttctaatttccctt

SEQ ID NO: 835 - DNA, 80 bp, synthetic construct
  misc_feature 1..80: note = Synthetic: DF0000250.4:START2081:INDEX736:OBS1_REV
  source 1..80: mol_type = other DNA
ttctaatagtttttttgtggattccttaggattttctatatacaagatcatgtcatctgcgaatagagatagttttactt

SEQ ID NO: 836 - DNA, 80 bp, synthetic construct
  misc_feature 1..80: note = Synthetic: DF0000320.4:START2081:INDEX645:OBS1_REV
  source 1..80: mol_type = other DNA
cttaaggagtttttgggctgagacgatggggttttctaaatatacaatcatgtcatctgcaaacagagacaatttgactt

SEQ ID NO: 837 - DNA, 80 bp, synthetic construct
  misc_feature 1..80: note = Synthetic: DF0000279.4:START801:INDEX932:OBS1_REV
  source 1..80: mol_type = other DNA
aagtcagaactatacaaaaaggtatactcagagaagtgtcactccctcctcatcccttccatcccgttcccatcccccat

SEQ ID NO: 838 - DNA, 80 bp, synthetic construct
  misc_feature 1..80: note = Synthetic: DF0000247.4:START2321:INDEX805:OBS1_REV
  source 1..80: mol_type = other DNA
ctctgttgattttttaactatatttttttgagttattttcttagtggttgctctagggattacaatatgcatcttaactt

SEQ ID NO: 839 - DNA, 80 bp, synthetic construct
  misc_feature 1..80: note = Synthetic: DF0000245.4:START241:INDEX57:OBS1_REV
  source 1..80: mol_type = other DNA
aatcccgttctgccccctccagtggctgccaggctgctggttttcaccgtgattgcgggctgttggttttcaaggctacc

SEQ ID NO: 840 - DNA, 80 bp, synthetic construct
  misc_feature 1..80: note = Synthetic: DF0000008.4:START801:INDEX383:OBS1_REV
  source 1..80: mol_type = other DNA
ctgctttagctgcatcccacaaattttgatatgttgtattttcattttcattcagttcaaaatattttctaatttccttt

SEQ ID NO: 841 - DNA, 80 bp, synthetic construct
  misc_feature 1..80: note = Synthetic: DF0000278.4:START161:INDEX917:OBS1_REV
  source 1..80: mol_type = other DNA
gcaggagcaggggtgggcaggagcatgagagatcgctcgctgggatttggtgatttttctctttttacttacagttattt

SEQ ID NO: 842 - DNA, 80 bp, synthetic construct
  misc_feature 1..80: note = Synthetic: DF0000248.4:START1281:INDEX133:OBS1_REV
  source 1..80: mol_type = other DNA
acattttagataatatattgtagcaactctggatactgattcccctcccccggcttgttgttgttgtttgcttgtttatt

SEQ ID NO: 843 - DNA, 80 bp, synthetic construct
  misc_feature 1..80: note = Synthetic: DF0000282.4:START1761:INDEX369:OBS1_REV
  source 1..80: mol_type = other DNA
aataagaaaaataaaagtttttattttaccttcacttattccttctctgatgctcttcctttctttatgtagatccgagt

SEQ ID NO: 844 - DNA, 80 bp, synthetic construct
  misc_feature 1..80: note = Synthetic: DF0000976.4:START189:INDEX207:OBS1_REV
  source 1..80: mol_type = other DNA
aataataataactccttacatttgtatagcactttacagtttacaaagcgctttcacatacattatctcatttgatcctc

SEQ ID NO: 845 - DNA, 80 bp, synthetic construct
  misc_feature 1..80: note = Synthetic: DF0000975.4:START189:INDEX261:OBS1_REV
  source 1..80: mol_type = other DNA
aataatagagctaccatttattgagcgcttactatgtgccaggcactgtgctaagcgctttacatgcattatctcattta

SEQ ID NO: 846 - DNA, 80 bp, synthetic construct
  misc_feature 1..80: note = Synthetic: DF0000001.4:START183:INDEX702:OBS1_REV
  source 1..80: mol_type = other DNA
aataatagctaacatttattgagcgcttactatgtgccaggcactgttctaagcgctttacatgtattaactcatttaat

SEQ ID NO: 847 - DNA, 80 bp, synthetic construct
  misc_feature 1..80: note = Synthetic: DF0001333.2:START603:INDEX226:OBS1_REV
  source 1..80: mol_type = other DNA
aatacaatacaactttattttgtatagcgtctttcatacaaactgtatcccaaaacgctttacagagttaaataatacaa

SEQ ID NO: 848 - DNA, 80 bp, synthetic construct
  misc_feature 1..80: note = Synthetic: DF0001250.2:START241:INDEX283:OBS1_REV
  source 1..80: mol_type = other DNA
gcctcagggcgcaagtacaaaatttaaaacatttaattaaaatacataaaacagagcagcagcagttatcagcatatatt

SEQ ID NO: 849 - DNA, 80 bp, synthetic construct
  misc_feature 1..80: note = Synthetic: DF0000278.4:START1841:INDEX559:OBS1_REV
  source 1..80: mol_type = other DNA
ctttctcctttccccctctctcctcccattttttagttgcattatttctactttgtcagaacatataacatttacatatt

SEQ ID NO: 850 - DNA, 80 bp, synthetic construct
  misc_feature 1..80: note = Synthetic: DF0000280.4:START2241:INDEX230:OBS1_REV
  source 1..80: mol_type = other DNA
aatcaggatccaaataaggtccatacattgcgattggttgatatgtctcttaagtctcttttaatctataggttccccct

SEQ ID NO: 851 - DNA, 80 bp, synthetic construct
  misc_feature 1..80: note = Synthetic: DF0000278.4:START1041:INDEX240:OBS1_REV
  source 1..80: mol_type = other DNA
caatgccccttattaaattttcatttgaatctattctcccttgggcaccttgtaatttagtcttcatttctgagatgatt

SEQ ID NO: 852 - DNA, 80 bp, synthetic construct
  misc_feature 1..80: note = Synthetic: DF0000278.4:START641:INDEX403:OBS1_REV
  source 1..80: mol_type = other DNA
attggggtgttttacaagattcctagttcaagggcgccctcttctgtcagtgtagcgaagttcagtttctttagtggatt

SEQ ID NO: 853 - DNA, 80 bp, synthetic construct
  misc_feature 1..80: note = Synthetic: DF0000008.4:START2481:INDEX820:OBS1_REV
  source 1..80: mol_type = other DNA
gtcctttgcatttccatataaattttagaatcagcttgtcaatttctacaaaaaaacctgctgggattttgattgggatt

SEQ ID NO: 854 - DNA, 80 bp, synthetic construct
  misc_feature 1..80: note = Synthetic: DF0000250.4:START2481:INDEX38:OBS1_REV
  source 1..80: mol_type = other DNA
gtcccttgcatttccatatgaattttaggatcagcttgtcaatttctgcaaaaaagtcagctgggattttgatagggatt

SEQ ID NO: 855 - DNA, 80 bp, synthetic construct
  misc_feature 1..80: note = Synthetic: DF0000318.4:START241:INDEX453:OBS1_REV
  source 1..80: mol_type = other DNA
aatctcctggtctgcgggttgcgaagaccgtgggaaaagcgtagtatctgggccggagtgcaccgttcctcacggcacag

SEQ ID NO: 856 - DNA, 80 bp, synthetic construct
  misc_feature 1..80: note = Synthetic: DF0000008.4:START1:INDEX97:OBS1_REV
  source 1..80: mol_type = other DNA
aatctctgccttttaattggagtgtttagtccatttacatttaatgtaattattgatatgtttgggtttaaatctaccat

SEQ ID NO: 857 - DNA, 80 bp, synthetic construct
  misc_feature 1..80: note = Synthetic: DF0000250.4:START1:INDEX717:OBS1_REV
  source 1..80: mol_type = other DNA
aatctctgccttttgattggagtgtttaatccatttacatttaatgtaattactgatatggttggatttacgtctgccat

SEQ ID NO: 858 - DNA, 80 bp, synthetic construct
  misc_feature 1..80: note = Synthetic: DF0000285.4:START1:INDEX700:OBS1_REV
  source 1..80: mol_type = other DNA
aatctctgtcttttaattggtgtatttagaccatttacatttaaagtgattattgatatagttggattaatatctaccat

SEQ ID NO: 859 - DNA, 80 bp, synthetic construct
  misc_feature 1..80: note = Synthetic: DF0000248.4:START801:INDEX374:OBS1_REV
  source 1..80: mol_type = other DNA
ctagctggcctacggtttagcttgttgctctcatggagctaccagcctcctcttaattgcttaccaccaaaatctccatt

SEQ ID NO: 860 - DNA, 80 bp, synthetic construct
  misc_feature 1..80: note = Synthetic: DF0000245.4:START2481:INDEX255:OBS1_REV
  source 1..80: mol_type = other DNA
taaggtaggatttacttctgccattttgctatttgttttctatatgtcttatgtcttttttgttcctctattcctccatt

SEQ ID NO: 861 - DNA, 80 bp, synthetic construct
  misc_feature 1..80: note = Synthetic: DF0000010.4:START1841:INDEX815:OBS1_REV
  source 1..80: mol_type = other DNA
aatggtgatttttctaattccatcattccttctacatttattagttggcattctactgtaaggaagagctttcccttctc

SEQ ID NO: 862 - DNA, 80 bp, synthetic construct
  misc_feature 1..80: note = Synthetic: DF0000285.4:START2801:INDEX43:OBS1_REV
  source 1..80: mol_type = other DNA
gttaatttttgtgaagggtgtaaggtctgtgtctagattcatttttttgcatgtggatgtccagttgttccagcaccatt

SEQ ID NO: 863 - DNA, 80 bp, synthetic construct
  misc_feature 1..80: note = Synthetic: DF0000008.4:START2801:INDEX27:OBS1_REV
  source 1..80: mol_type = other DNA
attaatttttgtgtatggtgtgaggtaggggtcgagtttcatttttttccatatggatatccaattgttccagcaccatt

SEQ ID NO: 864 - DNA, 80 bp, synthetic construct
  misc_feature 1..80: note = Synthetic: DF0000250.4:START2801:INDEX227:OBS1_REV
  source 1..80: mol_type = other DNA
gttaatttttgtatatggtgtgaggtaggggtccaacttcattcttttgcatgtggatatccagttgtcccagcaccatt

SEQ ID NO: 865 - DNA, 80 bp, synthetic construct
  misc_feature 1..80: note = Synthetic: DF0000320.4:START2801:INDEX251:OBS1_REV
  source 1..80: mol_type = other DNA
gttaatttttgtataaggtgtaaggaaggggtccagtttcagttttctgcatatggctagccagttttcccaacaccatt

SEQ ID NO: 866 - DNA, 80 bp, synthetic construct
  misc_feature 1..80: note = Synthetic: DF0000250.4:START1121:INDEX364:OBS1_REV
  source 1..80: mol_type = other DNA
aatgtcccctctttcattcctgattttagtaatttgagtcttctctctttttttcttggtcagtctagctaaaggtttgt

SEQ ID NO: 867 - DNA, 80 bp, synthetic construct
  misc_feature 1..80: note = Synthetic: DF0000277.4:START2081:INDEX297:OBS1_REV
  source 1..80: mol_type = other DNA
aatgtccctcaattgggatttgtctgatgtttttctcatgattagactggggttatgggtttttgggaggaagaccacag

SEQ ID NO: 868 - DNA, 80 bp, synthetic construct
  misc_feature 1..80: note = Synthetic: DF0000318.4:START561:INDEX594:OBS1_REV
  source 1..80: mol_type = other DNA
agtaatggcggacgcccctccccccaccaagctcgagcgtcccaggtcgacttcagactgctgtgctggcagcgagaatt

SEQ ID NO: 869 - DNA, 80 bp, synthetic construct
  misc_feature 1..80: note = Synthetic: DF0000279.4:START321:INDEX303:OBS1_REV
  source 1..80: mol_type = other DNA
cttcagggtaaattcctagaagtgggattgctgggtcaaagggtaaatgcatatgtagttttgttagatattgccaaatt

SEQ ID NO: 870 - DNA, 80 bp, synthetic construct
  misc_feature 1..80: note = Synthetic: DF0000282.4:START1681:INDEX894:OBS1_REV
  source 1..80: mol_type = other DNA
ttctgacctatatcattttccttctctctgaagaacttcttttaacatttcttgcaaggcaggtctactggcaacaaatt

SEQ ID NO: 871 - DNA, 80 bp, synthetic construct
  misc_feature 1..80: note = Synthetic: DF0000320.4:START2241:INDEX430:OBS1_REV
  source 1..80: mol_type = other DNA
taagttgtattcctaggtattttattctctttgtagcaattgtgaatgggagttcactcatgatttggctctctgtttgt

SEQ ID NO: 872 - DNA, 80 bp, synthetic construct
  misc_feature 1..80: note = Synthetic: DF0000285.4:START2241:INDEX579:OBS1_REV
  source 1..80: mol_type = other DNA
ttagatttatacctaagtatttcatttttgggggtgctaatgtaaatggtattgtgtttttaatttcaaattccatttgt

SEQ ID NO: 873 - DNA, 80 bp, synthetic construct
  misc_feature 1..80: note = Synthetic: DF0000250.4:START2241:INDEX398:OBS1_REV
  source 1..80: mol_type = other DNA
ttaaatttattcctaagtattttattctttttgatgctattgtaaatggaattgttttcttaatttcattttcggattgt

SEQ ID NO: 874 - DNA, 80 bp, synthetic construct
  misc_feature 1..80: note = Synthetic: DF0000008.4:START2241:INDEX723:OBS1_REV
  source 1..80: mol_type = other DNA
ttagatttattcctaagtattttatgttttttgatgctattgtaaatggtattgttttttaaatttcattttccaattgt

SEQ ID NO: 875 - DNA, 80 bp, synthetic construct
  misc_feature 1..80: note = Synthetic: DF0000277.4:START1681:INDEX117:OBS1_REV
  source 1..80: mol_type = other DNA
cagtatggactcatggatatttattttatactttgggttataatccaatactactttatttattttgttgctcaaattgt

SEQ ID NO: 876 - DNA, 80 bp, synthetic construct
  misc_feature 1..80: note = Synthetic: DF0000280.4:START881:INDEX552:OBS1_REV
  source 1..80: mol_type = other DNA
acacagttaggttcatttgtttcattttgctttcgatttttagggattgcttttttaaatttaattttgttttataatta

SEQ ID NO: 877 - DNA, 80 bp, synthetic construct
  misc_feature 1..80: note = Synthetic: DF0000246.4:START1361:INDEX740:OBS1_REV
  source 1..80: mol_type = other DNA
acacgtatgttggtacgcttgatattgtcccacaggtctctgaggctctgttcatttttcttcaatcttttttctctctg

SEQ ID NO: 878 - DNA, 80 bp, synthetic construct
  misc_feature 1..80: note = Synthetic: DF0000280.4:START1041:INDEX46:OBS1_REV
  source 1..80: mol_type = other DNA
acactaccaccaacaatatgattactgaaaacagtttaagatttttttgcagttctttttgtccttagggtatatcccac

SEQ ID NO: 879 - DNA, 80 bp, synthetic construct
  misc_feature 1..80: note = Synthetic: DF0000278.4:START961:INDEX656:OBS1_REV
  source 1..80: mol_type = other DNA
ttgtctttttcttctatttctttcctgagttcaatcaactcttttttcatttcttcctttatttttttgtccatttctgt

SEQ ID NO: 880 - DNA, 80 bp, synthetic construct
  misc_feature 1..80: note = Synthetic: DF0000275.4:START961:INDEX944:OBS1_REV
  source 1..80: mol_type = other DNA
acagcaaaattgagcggaaggtacagagatttcccatataccccctgcccccacacatgcacagcctcccccactatcaa

SEQ ID NO: 881 - DNA, 80 bp, synthetic construct
  misc_feature 1..80: note = Synthetic: DF0000053.4:START81:INDEX640:OBS1_REV
  source 1..80: mol_type = other DNA
acaggcgcccgccactacgcccggctaattttttgtatttttagtagagacggggtttcaccgttttagccgggatggtc

SEQ ID NO: 882 - DNA, 80 bp, synthetic construct
  misc_feature 1..80: note = Synthetic: DF0000001.4:START1:INDEX247:OBS1_REV
  source 1..80: mol_type = other DNA
ctagtaagtggcagagccgggattcgaacccaggcagtctggctccagagcccgtgctcttaaccactatgctatactgt

SEQ ID NO: 883 - DNA, 80 bp, synthetic construct
  misc_feature 1..80: note = Synthetic: DF0000281.4:START2001:INDEX50:OBS1_REV
  source 1..80: mol_type = other DNA
acataatgtctggttgtcccacttttagtgatgctaagattgatcagtgggttcaggtgttgtcagcctgatccttccat

SEQ ID NO: 884 - DNA, 80 bp, synthetic construct
  misc_feature 1..80: note = Synthetic: DF0000281.4:START2561:INDEX649:OBS1_REV
  source 1..80: mol_type = other DNA
cacctacttcctccctcctggagtattttaaagcaaatcccagacatcatatcatttcacccgtaaatacttcagtatgt

SEQ ID NO: 885 - DNA, 80 bp, synthetic construct
  misc_feature 1..80: note = Synthetic: DF0000010.4:START1601:INDEX56:OBS1_REV
  source 1..80: mol_type = other DNA
acatgtccccatcattctttgagcacttccttactttctggcacaacaagatgttccaggctcatcttgtactttccctg

SEQ ID NO: 886 - DNA, 80 bp, synthetic construct
  misc_feature 1..80: note = Synthetic: DF0000248.4:START3121:INDEX335:OBS1_REV
  source 1..80: mol_type = other DNA
atagttggatcttgttttttaatccagtctgacaatctctgccttttgattggattgtttaatccattcacatttaatgt

SEQ ID NO: 887 - DNA, 80 bp, synthetic construct
  misc_feature 1..80: note = Synthetic: DF0000275.4:START801:INDEX901:OBS1_REV
  source 1..80: mol_type = other DNA
acattagggttcactcttggtgttgtacattctatgggtttggacaaatgtataatgacatgtatccaccattatagtat

SEQ ID NO: 888 - DNA, 80 bp, synthetic construct
  misc_feature 1..80: note = Synthetic: DF0000245.4:START1041:INDEX493:OBS1_REV
  source 1..80: mol_type = other DNA
tgtatgggccatactttcttgtttctttgcatgtctcgtaattttttgttgaaaactggacattttaaataatataatgt

SEQ ID NO: 889 - DNA, 80 bp, synthetic construct
  misc_feature 1..80: note = Synthetic: DF0000010.4:START2481:INDEX518:OBS1_REV
  source 1..80: mol_type = other DNA
acattctcttacataaccacagtacaattatcaaaatcaggaaattaacattgatacaatactattatctaatctacaga

SEQ ID NO: 890 - DNA, 80 bp, synthetic construct
  misc_feature 1..80: note = Synthetic: DF0000282.4:START1361:INDEX817:OBS1_REV
  source 1..80: mol_type = other DNA
tttgattttctgcagtttgaatatgatatgcctaggtgtagtttcgttttgttttttttttggcatttatcctgcttggt

SEQ ID NO: 891 - DNA, 80 bp, synthetic construct
  misc_feature 1..80: note = Synthetic: DF0000320.4:START1201:INDEX754:OBS1_REV
  source 1..80: mol_type = other DNA
tctagattttctagtttatttgcgtagaggtgtttatagtattctctgatggtagtttgtatttctgtgggatcagtggt

SEQ ID NO: 892 - DNA, 80 bp, synthetic construct
  misc_feature 1..80: note = Synthetic: DF0001333.2:START561:INDEX965:OBS1_REV
  source 1..80: mol_type = other DNA
ctgtatcccaaaacgctttacagagttaaataatacaagacagcggacagtatatggtataaattacagaaaacagtggt

SEQ ID NO: 893 - DNA, 80 bp, synthetic construct
  misc_feature 1..80: note = Synthetic: DF0001198.2:START641:INDEX3:OBS1_REV
  source 1..80: mol_type = other DNA
caccttggagagaatataatccgcatgtttgctgaaagtaagagagggatctagccagattccaagatatttaaactggt

SEQ ID NO: 894 - DNA, 80 bp, synthetic construct
  misc_feature 1..80: note = Synthetic: DF0000248.4:START2481:INDEX941:OBS1_REV
  source 1..80: mol_type = other DNA
acccacctcctttgtgctgttattgtcaaatatattacatttctatatgttataggcccaacaatacaattatatacata

SEQ ID NO: 895 - DNA, 80 bp, synthetic construct
  misc_feature 1..80: note = Synthetic: DF0000246.4:START401:INDEX884:OBS1_REV
  source 1..80: mol_type = other DNA
ggatctccccgttaaatttctggctggtccgccgctcgccccaaccgggaccgcaacctcaggctagcagagctgcgggt

SEQ ID NO: 896 - DNA, 80 bp, synthetic construct
  misc_feature 1..80: note = Synthetic: DF0000249.4:START561:INDEX660:OBS1_REV
  source 1..80: mol_type = other DNA
ggtcttctcaggtcttttctgagcctgcgcctttccctgggcatgcgcggttactttctaattttccccgtatatgcggt

SEQ ID NO: 897 - DNA, 80 bp, synthetic construct
  misc_feature 1..80: note = Synthetic: DF0000318.4:START1041:INDEX332:OBS1_REV
  source 1..80: mol_type = other DNA
tgctgcctgttccttcctctggaagcttcgtcccagaggggcacccgccagatgccagccggagctctcctgtatgaggt

SEQ ID NO: 898 - DNA, 80 bp, synthetic construct
  misc_feature 1..80: note = Synthetic: DF0001161.2:START235:INDEX270:OBS1_REV
  source 1..80: mol_type = other DNA
acctcgcctccggttccccgaatttcaaatctgggaaccgttagcaggagcatcctagctgatctcaattgccgtgacgg

SEQ ID NO: 899 - DNA, 80 bp, synthetic construct
  misc_feature 1..80: note = Synthetic: DF0000283.4:START241:INDEX277:OBS1_REV
  source 1..80: mol_type = other DNA
acgaaagtgtgggggcccccctagactgggcccccgggagtttctcactctcatgctagtccacactcagcctccagcaa

SEQ ID NO: 900 - DNA, 80 bp, synthetic construct
  misc_feature 1..80: note = Synthetic: DF0000359.4:START161:INDEX693:OBS1_REV
  source 1..80: mol_type = other DNA
ctctctgagaaggtgacatttgagcaaagacctgaaggaggtgagggagcgagccatgcggatatctgggggaagagcgt

SEQ ID NO: 901 - DNA, 80 bp, synthetic construct
  misc_feature 1..80: note = Synthetic: DF0000245.4:START161:INDEX304:OBS1_REV
  source 1..80: mol_type = other DNA
gcggagctggggagagggggatgggaatagggcaagttaaaacgccacaaagctcgctgttcttaccgagattcagccgt

SEQ ID NO: 902 - DNA, 80 bp, synthetic construct
  misc_feature 1..80: note = Synthetic: DF0000247.4:START401:INDEX777:OBS1_REV
  source 1..80: mol_type = other DNA
ctccctgttaaatttctggctagtctgccggtctgttgcttgccccaaccagtaccgcaacctcaggctagctgtgtcgt

SEQ ID NO: 903 - DNA, 80 bp, synthetic construct
  misc_feature 1..80: note = Synthetic: DF0000318.4:START1201:INDEX915:OBS1_REV
  source 1..80: mol_type = other DNA
acgtcctttttgttgatgttgatgctattcctttctgtttgttagttttccttctaacagtcaggcccctctgctgcagg

SEQ ID NO: 904 - DNA, 80 bp, synthetic construct
  misc_feature 1..80: note = Synthetic: DF0000008.4:START1201:INDEX517:OBS1_REV
  source 1..80: mol_type = other DNA
tctaagttttcaaatttattggcataaagttgttcataatattctcttattatccttttaatgtctgtaggatctgtagt

SEQ ID NO: 905 - DNA, 80 bp, synthetic construct
  misc_feature 1..80: note = Synthetic: DF0000250.4:START1201:INDEX709:OBS1_REV
  source 1..80: mol_type = other DNA
tctaggttatctaatttgttggcatacaattgttcatagtattcccttataatcctttttatttctgtaaggtcggtagt

SEQ ID NO: 906 - DNA, 80 bp, synthetic construct
  misc_feature 1..80: note = Synthetic: DF0000285.4:START1201:INDEX566:OBS1_REV
  source 1..80: mol_type = other DNA
tctaggttatcaaatttgtgggcatagagttgttcatagtattcctttattatccttttaatgtccatgggatctgtagt

SEQ ID NO: 907 - DNA, 80 bp, synthetic construct
  misc_feature 1..80: note = Synthetic: DF0001067.4:START1308:INDEX897:OBS1_REV
  source 1..80: mol_type = other DNA
tttttttttttttagtatttattgatcattcttgggtgtttctcggagagggggatgtggcagggtcataggataatagt

SEQ ID NO: 908 - DNA, 80 bp, synthetic construct
  misc_feature 1..80: note = Synthetic: DF0001071.4:START1303:INDEX168:OBS3_REV
  source 1..80: mol_type = other DNA
ttttttttttttttttttttattgatcattcttgggtgtttctcgcagagggggatttggcagggtcataggacaatagt

SEQ ID NO: 909 - DNA, 80 bp, synthetic construct
  misc_feature 1..80: note = Synthetic: DF0000073.4:START1:INDEX619:OBS1_REV
  source 1..80: mol_type = other DNA
actcctgggctcaagctatcctcccgcctctttgcctccctaagagctgggattacaggcgtgagccaccgcgcccggcc

SEQ ID NO: 910 - DNA, 80 bp, synthetic construct
  misc_feature 1..80: note = Synthetic: DF0000279.4:START2321:INDEX595:OBS1_REV
  source 1..80: mol_type = other DNA
caggatccaatccaggatcccacattgcatttagttgtcatgtctccttagtctcctccaatctgtgacagttcctcagt

SEQ ID NO: 911 - DNA, 80 bp, synthetic construct
  misc_feature 1..80: note = Synthetic: DF0000277.4:START961:INDEX185:OBS1_REV
  source 1..80: mol_type = other DNA
tcatttccaaagttacttaggtcagcacctttttcccccacccccttcagtgaggttgtttcatacatttgtaatacagt

SEQ ID NO: 912 - DNA, 80 bp, synthetic construct
  misc_feature 1..80: note = Synthetic: DF0001198.2:START1121:INDEX466:OBS1_REV
  source 1..80: mol_type = other DNA
tgttggtgcctgttttaatggaacaggtagcttattccagctgtttggggctgcaaccccaaaagcctgcctcccatagt

SEQ ID NO: 913 - DNA, 80 bp, synthetic construct
  misc_feature 1..80: note = Synthetic: DF0001198.2:START881:INDEX115:OBS1_REV
  source 1..80: mol_type = other DNA
acttggccaattaagtcgattgtagaggtcacaacgatgggtcctgagttcacaagaaagtgcaattccgcagagtttat

SEQ ID NO: 914 - DNA, 80 bp, synthetic construct
  misc_feature 1..80: note = Synthetic: DF0001198.2:START1041:INDEX765:OBS1_REV
  source 1..80: mol_type = other DNA
cagttttggctctaggcactttaaaattaatagactgggtcgagcgaagggcatatttgcagtctgcattggataaaagt

SEQ ID NO: 915 - DNA, 80 bp, synthetic construct
  misc_feature 1..80: note = Synthetic: DF0000246.4:START1201:INDEX118:OBS1_REV
  source 1..80: mol_type = other DNA
gcccatctagtgaatttttcatttcagttattgtacttttcagctctagaatttccatttggttcttttttatagtttct

SEQ ID NO: 916 - DNA, 80 bp, synthetic construct
  misc_feature 1..80: note = Synthetic: DF0000320.4:START1281:INDEX621:OBS1_REV
  source 1..80: mol_type = other DNA
ttattggtctattcagggattcgacttcttcctggtttagtcttgggagggtgtatgtgtccaggaatttatccatttct

SEQ ID NO: 917 - DNA, 80 bp, synthetic construct
  misc_feature 1..80: note = Synthetic: DF0000278.4:START81:INDEX345:OBS1_REV
  source 1..80: mol_type = other DNA
tgaagtttgggcattctctgtcttcaagttatgctgagggcgtggtttttgtgtagttttattttccttcttgttgttct

SEQ ID NO: 918 - DNA, 80 bp, synthetic construct
  misc_feature 1..80: note = Synthetic: DF0000278.4:START1281:INDEX465:OBS1_REV
  source 1..80: mol_type = other DNA
ccctttcaatatgtagattcaggtctttttcttttatttccggaaagttttcttggattatagttttaaatattagttct

SEQ ID NO: 919 - DNA, 80 bp, synthetic construct
  misc_feature 1..80: note = Synthetic: DF0000016.4:START1:INDEX343:OBS1_REV
  source 1..80: mol_type = other DNA
agaactcctgggctcaagcgatcctcccgcctcagcctcccgagtagctgggactacaggcgcgcgccaccgcgcccggc

SEQ ID NO: 920 - DNA, 80 bp, synthetic construct
  misc_feature 1..80: note = Synthetic: DF0000245.4:START1841:INDEX123:OBS1_REV
  source 1..80: mol_type = other DNA
gatagttttgccggatatagaattcttggttgacagtctttttctttcagcactttgaatatgtcatcccactgccttct

SEQ ID NO: 921 - DNA, 80 bp, synthetic construct
  misc_feature 1..80: note = Synthetic: DF0000250.4:START1921:INDEX822:OBS1_REV
  source 1..80: mol_type = other DNA
agaagtggcgagagcggacatccttgtcttgttcctgatcttagggggaaagctttcagtctttcaccattaagtatgat

SEQ ID NO: 922 - DNA, 80 bp, synthetic construct
  misc_feature 1..80: note = Synthetic: DF0000277.4:START721:INDEX653:OBS1_REV
  source 1..80: mol_type = other DNA
agaatagtttcaccgccctaaaaaatcccctgtgcttcacctattcaacccttcccccttctccccgaacccctggcaac

SEQ ID NO: 923 - DNA, 80 bp, synthetic construct
  misc_feature 1..80: note = Synthetic: DF0000008.4:START321:INDEX192:OBS1_REV
  source 1..80: mol_type = other DNA
cttttagttctgtcagtttttgcttcatgtattttgaagctctgttattaggtgcatacacatttaggattgttatgtct

SEQ ID NO: 924 - DNA, 80 bp, synthetic construct
  misc_feature 1..80: note = Synthetic: DF0000285.4:START321:INDEX169:OBS1_REV
  source 1..80: mol_type = other DNA
cttgcagttctatcagtttttgcctcacgtattttgacgctctgttgttaggcgcatacacgttaaggattgttatgtct

SEQ ID NO: 925 - DNA, 80 bp, synthetic construct
  misc_feature 1..80: note = Synthetic: DF0000249.4:START2321:INDEX224:OBS1_REV
  source 1..80: mol_type = other DNA
ttaatccatttacatttaaagtaattactgatagggaaggacttacttctgccattttgctatttgttttctgtatgtct

SEQ ID NO: 926 - DNA, 80 bp, synthetic construct
  misc_feature 1..80: note = Synthetic: DF0000008.4:START2721:INDEX165:OBS1_REV
  source 1..80: mol_type = other DNA
tgttgaaaagactatcctttccccactgaattgctttggcacctttgtcaaaaatcaattgtccatatatgtgtgggtct

SEQ ID NO: 927 - DNA, 80 bp, synthetic construct
  misc_feature 1..80: note = Synthetic: DF0000285.4:START2721:INDEX24:OBS1_REV
  source 1..80: mol_type = other DNA
tgttgaaaagactatcttttctccattgtattgcctttgctcctttgtcaaagatcagttgactatatttatgtgggtct

SEQ ID NO: 928 - DNA, 80 bp, synthetic construct
  misc_feature 1..80: note = Synthetic: DF0000249.4:START961:INDEX503:OBS1_REV
  source 1..80: mol_type = other DNA
ggtttctttttatgttttctatctctttgttgatatttccattttgttcatacatcgttttcttgactttctccacgtct

SEQ ID NO: 929 - DNA, 80 bp, synthetic construct
  misc_feature 1..80: note = Synthetic: DF0000285.4:START241:INDEX405:OBS1_REV
  source 1..80: mol_type = other DNA
tcttggagaattgacccctttatcattatgtaatgcccctctttatccctgataactttccttgctctgaagtctgctct

SEQ ID NO: 930 - DNA, 80 bp, synthetic construct
  misc_feature 1..80: note = Synthetic: DF0000319.4:START161:INDEX555:OBS1_REV
  source 1..80: mol_type = other DNA
tcaccgcctcccttggctggggggtgggggctcccctgccccgtgtggctctcaggtgggccgccgcaccacactgctct

SEQ ID NO: 931 - DNA, 80 bp, synthetic construct
  misc_feature 1..80: note = Synthetic: DF0000320.4:START321:INDEX963:OBS1_REV
  source 1..80: mol_type = other DNA
tttgtaggtctctaagaacttgctttatgaatctgggtgctcctgtattgggtgcatatatatttaggatagttagctct

SEQ ID NO: 932 - DNA, 80 bp, synthetic construct
  misc_feature 1..80: note = Synthetic: DF0000279.4:START1761:INDEX491:OBS1_REV
  source 1..80: mol_type = other DNA
agagctgtcccttctcccccatttatttatttattcaattatttatttatatcagtatggactcatggatatttatttta

SEQ ID NO: 933 - DNA, 80 bp, synthetic construct
  misc_feature 1..80: note = Synthetic: DF0000283.4:START801:INDEX840:OBS1_REV
  source 1..80: mol_type = other DNA
ttttatgtttatctggctaggagttgggctgtgtttaatgtttgctgtagctgtaggtgccagaggctaaattttcctct

SEQ ID NO: 934 - DNA, 80 bp, synthetic construct
  misc_feature 1..80: note = Synthetic: DF0000277.4:START2241:INDEX615:OBS1_REV
  source 1..80: mol_type = other DNA
cctaatgtcctttttctgttccaggatcccatccaggataccacattacatttagtcgtcatgtctccttaggctcctct

SEQ ID NO: 935 - DNA, 80 bp, synthetic construct
  misc_feature 1..80: note = Synthetic: DF0000284.4:START241:INDEX34:OBS1_REV
  source 1..80: mol_type = other DNA
gctagcccacactcggcctttaataattcgttaaaattttagctgatttcttcttacccgcttttatggcggccacctct

SEQ ID NO: 936 - DNA, 80 bp, synthetic construct
  misc_feature 1..80: note = Synthetic: DF0001198.2:START721:INDEX141:OBS1_REV
  source 1..80: mol_type = other DNA
agatactgctgaacaacctgcttccctacaaactcattcatactttttcttgatctgtacaacgttcccaatctcgggcc

SEQ ID NO: 937 - DNA, 80 bp, synthetic construct
  misc_feature 1..80: note = Synthetic: DF0000247.4:START721:INDEX751:OBS1_REV
  source 1..80: mol_type = other DNA
agtggtcagccaatgattggtcagaggttgtgcttaaacaccttgagccagtaaggcttccaccctttgccgatggatct

SEQ ID NO: 938 - DNA, 80 bp, synthetic construct
  misc_feature 1..80: note = Synthetic: DF0001280.2:START161:INDEX9:OBS1_REV
  source 1..80: mol_type = other DNA
agcatagttgctgaaagcccttgctccaagggactcgagattatactttggacagactaaatagcctgctgattctgacc

SEQ ID NO: 939 - DNA, 80 bp, synthetic construct
  misc_feature 1..80: note = Synthetic: DF0000245.4:START641:INDEX355:OBS1_REV
  source 1..80: mol_type = other DNA
agcctcaaggtcagccagaggtgagagcttagggccttctcaggtctttcctgggcatgcgcacagccctgcgcatgcgc

SEQ ID NO: 940 - DNA, 80 bp, synthetic construct
  misc_feature 1..80: note = Synthetic: DF0000318.4:START321:INDEX934:OBS1_REV
  source 1..80: mol_type = other DNA
agctagctcggtgtctgcccaaacggccgcccagttttgtgcttgaaacccagggccctggtggcgtaggcacccgaggg

SEQ ID NO: 941 - DNA, 80 bp, synthetic construct
  misc_feature 1..80: note = Synthetic: DF0000318.4:START801:INDEX710:OBS1_REV
  source 1..80: mol_type = other DNA
agctgcgcccacagccgccccttcccccaggtgctctgtcccagggagatgggagttttatctataagcccctgactggg

SEQ ID NO: 942 - DNA, 80 bp, synthetic construct
  misc_feature 1..80: note = Synthetic: DF0000284.4:START961:INDEX81:OBS1_REV
  source 1..80: mol_type = other DNA
agctttcggctttccctgcgcgcctgcgcctcagagggggtctctctccatgctcttgcccctcccccagcggtagactg

SEQ ID NO: 943 - DNA, 80 bp, synthetic construct
  misc_feature 1..80: note = Synthetic: DF0000284.4:START1:INDEX84:OBS1_REV
  source 1..80: mol_type = other DNA
ctcgttgttagggtgggagcgacgttctcttgcggctttctacatcctaagcggaagcggaactgaaagtggaagttcct

SEQ ID NO: 944 - DNA, 80 bp, synthetic construct
  misc_feature 1..80: note = Synthetic: DF0001198.2:START321:INDEX114:OBS1_REV
  source 1..80: mol_type = other DNA
aggaatcacatttagctggaaggttattaacagaaatagaaaatgaaagaggcccgagaatttatttctcaggcactctc

SEQ ID NO: 945 - DNA, 80 bp, synthetic construct
  misc_feature 1..80: note = Synthetic: DF0000245.4:START2081:INDEX489:OBS1_REV
  source 1..80: mol_type = other DNA
aggagaaaaaaagagttacaaactaaaaatacatttatactgtcttttatatttacctatgtagttacctttaccggtgc

SEQ ID NO: 946 - DNA, 80 bp, synthetic construct
  misc_feature 1..80: note = Synthetic: DF0000320.4:START1921:INDEX669:OBS1_REV
  source 1..80: mol_type = other DNA
aggagtggtgagagagggcatccttgtcttgtgccggttttcaaagggaatgcttccagcttttgcccattcagtatgat

SEQ ID NO: 947 - DNA, 80 bp, synthetic construct
  misc_feature 1..80: note = Synthetic: DF0000275.4:START401:INDEX382:OBS1_REV
  source 1..80: mol_type = other DNA
ccaagttttggcaattatgaataaagctgctataaacatccgtgtgcaggtttttgtgtggacataagttttcaactcct

SEQ ID NO: 948 - DNA, 80 bp, synthetic construct
  misc_feature 1..80: note = Synthetic: DF0001333.2:START401:INDEX677:OBS1_REV
  source 1..80: mol_type = other DNA
aggcaagggagaaaagatgtatttttagatgagatttgaaaagagatggagagtcgatgaggcggagagatacaggaagg

SEQ ID NO: 949 - DNA, 80 bp, synthetic construct
  misc_feature 1..80: note = Synthetic: DF0000248.4:START401:INDEX758:OBS1_REV
  source 1..80: mol_type = other DNA
cgcccggggtagagcctccgccctacgagtgggggctgggtggaggaagggagcccccgacctctcggccgcactcgcct

SEQ ID NO: 950 - DNA, 80 bp, synthetic construct
  misc_feature 1..80: note = Synthetic: DF0000282.4:START561:INDEX916:OBS1_REV
  source 1..80: mol_type = other DNA
ttcacaagtgcttctcagtttctcctccccccttaggtgggacaggatggctagagtgggctggagttgggtatttccct

SEQ ID NO: 951 - DNA, 80 bp, synthetic construct
  misc_feature 1..80: note = Synthetic: DF0000277.4:START2001:INDEX951:OBS1_REV
  source 1..80: mol_type = other DNA
aggtaaagtgccattctcatcacatcatatcaagggtacatactatcaacatgacttatcactgttgatgttgaccttga

SEQ ID NO: 952 - DNA, 80 bp, synthetic construct
  misc_feature 1..80: note = Synthetic: DF0000277.4:START801:INDEX41:OBS1_REV
  source 1..80: mol_type = other DNA
aggttcactctttgtgctgtaaagttctatgggttttgacaaatgcatagtgtcatgtatccaccattacagtatcatac

SEQ ID NO: 953 - DNA, 80 bp, synthetic construct
  misc_feature 1..80: note = Synthetic: DF0000278.4:START321:INDEX606:OBS1_REV
  source 1..80: mol_type = other DNA
atctacccggacacttttttagtattttcatacttagggtggactttctctttctggcggtggttttttcagatcaacct

SEQ ID NO: 954 - DNA, 80 bp, synthetic construct
  misc_feature 1..80: note = Synthetic: DF0001280.2:START1:INDEX214:OBS1_REV
  source 1..80: mol_type = other DNA
agtaacaaaactttaaaatcaatacggagttttacggggagccaatgcagagattttaaaatataagtgatgtattttca

SEQ ID NO: 955 - DNA, 80 bp, synthetic construct
  misc_feature 1..80: note = Synthetic: DF0000010.4:START1761:INDEX228:OBS1_REV
  source 1..80: mol_type = other DNA
ccccatttatttatttatttatttatatcagtatggactcatggattcttattttattcaatgggttataatccattact

SEQ ID NO: 956 - DNA, 80 bp, synthetic construct
  misc_feature 1..80: note = Synthetic: DF0000279.4:START1041:INDEX159:OBS1_REV
  source 1..80: mol_type = other DNA
agtatttgtgtacagttctttttgtctttagccttacagtattcagtcaaaatactgttttccaaagttacttaggttag

SEQ ID NO: 957 - DNA, 80 bp, synthetic construct
  misc_feature 1..80: note = Synthetic: DF0000634.4:START161:INDEX6:OBS1_REV
  source 1..80: mol_type = other DNA
gcgcgatctcgactcactgcaagctccgcctcccgggttcacgccattctcctgcctcagcctcccgtgtagctgggact

SEQ ID NO: 958 - DNA, 80 bp, synthetic construct
  misc_feature 1..80: note = Synthetic: DF0001240.2:START161:INDEX780:OBS1_REV
  source 1..80: mol_type = other DNA
cgcgatctcggctcactgcaggctccgccccccggggttcacgccattctcctgcctcagcctcccgagtagctgggact

SEQ ID NO: 959 - DNA, 80 bp, synthetic construct
  misc_feature 1..80: note = Synthetic: DF0000056.4:START161:INDEX952:OBS1_REV
  source 1..80: mol_type = other DNA
gcgcaatctcggctcactgcaagctccgcttcccgggttcacgccattctcctgcctcagcctccccagtagctgggact

SEQ ID NO: 960 - DNA, 80 bp, synthetic construct
  misc_feature 1..80: note = Synthetic: DF0000320.4:START1:INDEX444:OBS1_REV
  source 1..80: mol_type = other DNA
agtctgtgtcttttaattggggcatttagcccatttacatttaaggttaatattgttatgtgtgaatttgatcctgtcat

SEQ ID NO: 961 - DNA, 80 bp, synthetic construct
  misc_feature 1..80: note = Synthetic: DF0000248.4:START2961:INDEX392:OBS1_REV
  source 1..80: mol_type = other DNA
tcctcctttactgctttcttttgcattaagtgaatattttctagtgtaacattttaattcctttaatgatttttttcact

SEQ ID NO: 962 - DNA, 80 bp, synthetic construct
  misc_feature 1..80: note = Synthetic: DF0000245.4:START881:INDEX137:OBS1_REV
  source 1..80: mol_type = other DNA
agtgacttttctgaactaattctgtaaagtctgtattctttgtcgtgtgtggccactgaagtctctgctcggttagctta

SEQ ID NO: 963 - DNA, 80 bp, synthetic construct
  misc_feature 1..80: note = Synthetic: DF0000282.4:START2241:INDEX556:OBS1_REV
  source 1..80: mol_type = other DNA
agtgattattgatatagttggattaatatctaccatatttgttactgttttctatttgttgcccttgttctttgttccta

SEQ ID NO: 964 - DNA, 80 bp, synthetic construct
  misc_feature 1..80: note = Synthetic: DF0000278.4:START2321:INDEX679:OBS1_REV
  source 1..80: mol_type = other DNA
tattgcaacccttcttttttgtttccatttgcctggtatatctttttccatccctttattttcagcctttctgaatcact

SEQ ID NO: 965 - DNA, 80 bp, synthetic construct
  misc_feature 1..80: note = Synthetic: DF0001067.4:START161:INDEX778:OBS1_REV
  source 1..80: mol_type = other DNA
caacacggcgagaccccgtctccaccaaaaatacaaaaaccagtcaggcgtggcggcgcgcgcctgcaatcccaggcact

SEQ ID NO: 966 - DNA, 80 bp, synthetic construct
  misc_feature 1..80: note = Synthetic: DF0000283.4:START721:INDEX703:OBS1_REV
  source 1..80: mol_type = other DNA
agtgtccttgtttttgtctccccttttgtctttgggtttccctaggtactccttcttaaatagagtctgtgtcttgcagc

SEQ ID NO: 967 - DNA, 80 bp, synthetic construct
  misc_feature 1..80: note = Synthetic: DF0000249.4:START2081:INDEX110:OBS1_REV
  source 1..80: mol_type = other DNA
agttataacattctattttgaatttatatcaacttaacttcaattacatacaaaaactctgctcctttacagctccgtcc

SEQ ID NO: 968 - DNA, 80 bp, synthetic construct
  misc_feature 1..80: note = Synthetic: DF0000320.4:START961:INDEX584:OBS1_REV
  source 1..80: mol_type = other DNA
agttctgctctgatcttagttatttcttgtcttctgctagcttttgaatttgtttgctcttgcttctctagttcttttaa

SEQ ID NO: 969 - DNA, 80 bp, synthetic construct
  misc_feature 1..80: note = Synthetic: DF0000282.4:START1121:INDEX334:OBS1_REV
  source 1..80: mol_type = other DNA
agttcttggatattctgttctgttttttttcagtcttttttctctttgcttttcagttttggaagtttctattgacatat

SEQ ID NO: 970 - DNA, 80 bp, synthetic construct
  misc_feature 1..80: note = Synthetic: DF0000318.4:START1648:INDEX379:OBS1_REV
  source 1..80: mol_type = other DNA
agttgatcttcaatctctgatatcctttcttccgcttgatcgattcggctattgatacttgtgtatgcttcacgaagttc

SEQ ID NO: 971 - DNA, 80 bp, synthetic construct
  misc_feature 1..80: note = Synthetic: DF0000249.4:START1361:INDEX35:OBS1_REV
  source 1..80: mol_type = other DNA
agtttgattataatgtgtctcggtgtgggtctctttgagttcatcctacttggagttcgttgagcttcttggatttttat

SEQ ID NO: 972 - DNA, 80 bp, synthetic construct
  misc_feature 1..80: note = Synthetic: DF0000284.4:START801:INDEX883:OBS1_REV
  source 1..80: mol_type = other DNA
ttaggcaggccctgtgttcctgggcctcgggggtggggctttctcagcgttcctgcccctctctccatggcagccaaact

SEQ ID NO: 973 - DNA, 80 bp, synthetic construct
  misc_feature 1..80: note = Synthetic: DF0001198.2:START81:INDEX865:OBS1_REV
  source 1..80: mol_type = other DNA
atagtttaataaaattttctcctgtcacacagtcttcatctattgcattggagatagtgtggatacctttttttagatct

SEQ ID NO: 974 - DNA, 80 bp, synthetic construct
  misc_feature 1..80: note = Synthetic: DF0000283.4:START961:INDEX890:OBS1_REV
  source 1..80: mol_type = other DNA
atatctttgtcatatctgagtctggttctgatgcttgctttgtctcttcagactgtgtttttttttcttgccttttagca

SEQ ID NO: 975 - DNA, 80 bp, synthetic construct
  misc_feature 1..80: note = Synthetic: DF0000246.4:START1681:INDEX406:OBS1_REV
  source 1..80: mol_type = other DNA
atatgtcattccactgtcttctggcctccattgtttctgatgagaagtcagccgttaatcgtatcgttgttcccctgtac

SEQ ID NO: 976 - DNA, 80 bp, synthetic construct
  misc_feature 1..80: note = Synthetic: DF0000249.4:START1:INDEX384:OBS1_REV
  source 1..80: mol_type = other DNA
ttgtctaggtggggagacagattcctggtgcttcctactccgccatcttcccagaatcctctcctcattattttttttat

SEQ ID NO: 977 - DNA, 80 bp, synthetic construct
  misc_feature 1..80: note = Synthetic: DF0000008.4:START1121:INDEX685:OBS1_REV
  source 1..80: mol_type = other DNA
gatgtctcctttttcattcctgatattggtaatttgtgtcttctctctttttttcttgatcagtcttgctagaggtttat

SEQ ID NO: 978 - DNA, 80 bp, synthetic construct
  misc_feature 1..80: note = Synthetic: DF0000285.4:START1121:INDEX857:OBS1_REV
  source 1..80: mol_type = other DNA
gatgtcccctctttcatttctgatattagtaatttgtgtcttctctctttttttcttagttagcctggctagaggcttat

SEQ ID NO: 979 - DNA, 80 bp, synthetic construct
  misc_feature 1..80: note = Synthetic: DF0000245.4:START1601:INDEX605:OBS1_REV
  source 1..80: mol_type = other DNA
atcctacttggagttcgttgagcttcttggatgtgtagatttatgtttttcatcaaatttgggaagttttcggccattat

SEQ ID NO: 980 - DNA, 80 bp, synthetic construct
  misc_feature 1..80: note = Synthetic: DF0000279.4:START1921:INDEX138:OBS1_REV
  source 1..80: mol_type = other DNA
tatgcaaatatcctgtttctcctcaaactttcgcccactaattttagcatccatcggtggatcttgcctgcaacaattat

SEQ ID NO: 981 - DNA, 80 bp, synthetic construct
  misc_feature 1..80: note = Synthetic: DF0000279.4:START961:INDEX85:OBS1_REV
  source 1..80: mol_type = other DNA
ttcttttcttccccatccccttcagtgtggttatgttattcatttgtaatacagttaggttcatttgtttctgtttgtat

SEQ ID NO: 982 - DNA, 80 bp, synthetic construct
  misc_feature 1..80: note = Synthetic: DF0000279.4:START401:INDEX301:OBS1_REV
  source 1..80: mol_type = other DNA
ttccaatattttgcaattacaaacaatgctgcaatgaataaccttgtgcatatgttattttgtacatgttggaggtgtat

SEQ ID NO: 983 - DNA, 80 bp, synthetic construct
  misc_feature 1..80: note = Synthetic: DF0000281.4:START881:INDEX254:OBS1_REV
  source 1..80: mol_type = other DNA
atacagttaggttcatttgtttcattttgttttcgatttttagggattgctttttttaatttaattttgttttttaatta

SEQ ID NO: 984 - DNA, 80 bp, synthetic construct
  misc_feature 1..80: note = Synthetic: DF0000320.4:START1121:INDEX899:OBS1_REV
  source 1..80: mol_type = other DNA
gatatcccctttatcattttttattgtgtctatttgattcttctctcttttcttctttattagtctggctagcggtctat

SEQ ID NO: 985 - DNA, 80 bp, synthetic construct
  misc_feature 1..80: note = Synthetic: DF0000248.4:START1041:INDEX572:OBS1_REV
  source 1..80: mol_type = other DNA
atctctctgttaagctgtctgcctctgttggtatcacacccagctgttaggctccactaattgccggctgattgctctat

SEQ ID NO: 986 - DNA, 80 bp, synthetic construct
  misc_feature 1..80: note = Synthetic: DF0000248.4:START3041:INDEX28:OBS1_REV
  source 1..80: mol_type = other DNA
tattattgatatagttggatttacgtctgccattttactttttgttttctatatgtctcatgtcttttttgttcctctat

SEQ ID NO: 987 - DNA, 80 bp, synthetic construct
  misc_feature 1..80: note = Synthetic: DF0000248.4:START2801:INDEX439:OBS1_REV
  source 1..80: mol_type = other DNA
ttatactaacttaattccagtgagatatagaaacgttactcctatatagctctattcccttttccccctttttgtgctat

SEQ ID NO: 988 - DNA, 80 bp, synthetic construct
  misc_feature 1..80: note = Synthetic: DF0000010.4:START721:INDEX289:OBS1_REV
  source 1..80: mol_type = other DNA
atagtttcatcaccctaaaaaatcccctgtgcttctcctttgcagtcatcccctcttcccatctcccaacccctggcaac

SEQ ID NO: 989 - DNA, 80 bp, synthetic construct
  misc_feature 1..80: note = Synthetic: DF0000284.4:START1457:INDEX150:OBS1_REV
  source 1..80: mol_type = other DNA
atagtttccatctctctgctgaaatttcccatctgttcttgcatgttgtccaccttttttccactagatcctttaacata

SEQ ID NO: 990 - DNA, 80 bp, synthetic construct
  misc_feature 1..80: note = Synthetic: DF0000277.4:START1761:INDEX885:OBS1_REV
  source 1..80: mol_type = other DNA
taaattatttggaattcttctgcacgggagatttgtctcttctcccccatttatttatttattcaatcatttatttatat

SEQ ID NO: 991 - DNA, 80 bp, synthetic construct
  misc_feature 1..80: note = Synthetic: DF0000285.4:START1281:INDEX239:OBS1_REV
  source 1..80: mol_type = other DNA
atataggcctattcagattgtctatttcttcttgtgtgagttttggcagattgtgtctttcaaggaattggtccatttca

SEQ ID NO: 992 - DNA, 80 bp, synthetic construct
  misc_feature 1..80: note = Synthetic: DF0000008.4:START1281:INDEX305:OBS1_REV
  source 1..80: mol_type = other DNA
atatagggctattcagattttctatttcttcttgtgtcagttttggtaatttgtgtttttcaaggaatttgtccatttca

SEQ ID NO: 993 - DNA, 80 bp, synthetic construct
  misc_feature 1..80: note = Synthetic: DF0000010.4:START1361:INDEX317:OBS1_REV
  source 1..80: mol_type = other DNA
gtatatacatacacatatacacatacacatatatatctatatctatttctatatctgtccgtctgtatattcatatatat

SEQ ID NO: 994 - DNA, 80 bp, synthetic construct
  misc_feature 1..80: note = Synthetic: DF0000281.4:START1041:INDEX393:OBS1_REV
  source 1..80: mol_type = other DNA
atattactactaacaataagactactgaatgtagtttaagatttctttgcggttctttttgtccttagaatatatcccac

SEQ ID NO: 995 - DNA, 80 bp, synthetic construct
  misc_feature 1..80: note = Synthetic: DF0000008.4:START1521:INDEX535:OBS1_REV
  source 1..80: mol_type = other DNA
atattggtctgtaattttcttttcttgtaatgtctttgtctggttttggtatcagggttatgctggcctcataaaatgag

SEQ ID NO: 996 - DNA, 80 bp, synthetic construct
  misc_feature 1..80: note = Synthetic: DF0000285.4:START1521:INDEX539:OBS1_REV
  source 1..80: mol_type = other DNA
atattggtctgtagttttcttttcttgtaatgtctttgtctggttttggtattagggtaatgctggcctcatagaatgag

SEQ ID NO: 997 - DNA, 80 bp, synthetic construct
  misc_feature 1..80: note = Synthetic: DF0000248.4:START2881:INDEX310:OBS1_REV
  source 1..80: mol_type = other DNA
atatttttttgagttattttcttagtggttgctctagggcttaccatatacatcttaacttatcagaatctacttcagat

SEQ ID NO: 998 - DNA, 80 bp, synthetic construct
  misc_feature 1..80: note = Synthetic: DF0000250.4:START481:INDEX407:OBS1_REV
  source 1..80: mol_type = other DNA
gttgggtggagtgttctatagatgtctgttaggtctagttggtttatagtgttgttcaagtcttctatttccttgttgat

SEQ ID NO: 999 - DNA, 80 bp, synthetic construct
  misc_feature 1..80: note = Synthetic: DF0000320.4:START561:INDEX953:OBS1_REV
  source 1..80: mol_type = other DNA
ggagtgttttacttccaattatgtggtcaattttagaataagtgcgatgtggcgctgagaagaatgtatattctgttgat

SEQ ID NO: 1000 - DNA, 80 bp, synthetic construct
  misc_feature 1..80: note = Synthetic: DF0000281.4:START961:INDEX860:OBS1_REV
  source 1..80: mol_type = other DNA
tagggatgtacagtcaaattactgtgttttaaagtcacttgaaataattcttctctgtgtggttatgccaccaacttgat

SEQ ID NO: 1001 - DNA, 80 bp, synthetic construct
  misc_feature 1..80: note = Synthetic: DF0000320.4:START161:INDEX346:OBS1_REV
  source 1..80: mol_type = other DNA
atcagagactaggattgcaacccctgcttttttttgctttccatttgcttggtaaattttcctccatccctttattttga

SEQ ID NO: 1002 - DNA, 80 bp, synthetic construct
  misc_feature 1..80: note = Synthetic: DF0000281.4:START2241:INDEX498:OBS1_REV
  source 1..80: mol_type = other DNA
ttttttttctcgccatttatttgttgaagaaaccgggtcatttgtcctgtagaatttcccacattctggatttggctgat

SEQ ID NO: 1003 - DNA, 80 bp, synthetic construct
  misc_feature 1..80: note = Synthetic: DF0000285.4:START481:INDEX694:OBS1_REV
  source 1..80: mol_type = other DNA
gttggatgaagtattctatagatgtcaattatatccagttgattgatggtgctgtttagttcaactatgtccttactgat

SEQ ID NO: 1004 - DNA, 80 bp, synthetic construct
  misc_feature 1..80: note = Synthetic: DF0000008.4:START481:INDEX259:OBS1_REV
  source 1..80: mol_type = other DNA
gttgggtgtagtgttctataaatgtcaattaggtcaagttggttgatagtgttgttcaaatcttctatatccttactgat

SEQ ID NO: 1005 - DNA, 80 bp, synthetic construct
  misc_feature 1..80: note = Synthetic: DF0000278.4:START721:INDEX437:OBS1_REV
  source 1..80: mol_type = other DNA
gttttgattctcattttctgatgttttttttttgtagtagctttgtatggatttattctattcttgttcatttttatgat

SEQ ID NO: 1006 - DNA, 80 bp, synthetic construct
  misc_feature 1..80: note = Synthetic: DF0000010.4:START1681:INDEX680:OBS1_REV
  source 1..80: mol_type = other DNA
atcattatttattttgatgctcaaattgtcccagatttggccagtgggagccccttcaagctggctcctgtgtccttttg

SEQ ID NO: 1007 - DNA, 80 bp, synthetic construct
  misc_feature 1..80: note = Synthetic: DF0000041.4:START161:INDEX237:OBS1_REV
  source 1..80: mol_type = other DNA
tggcgcgatctcggctcactgcaacctccgcctcccgggttcaagcaattctctgcctcagcctcccgagtagctgggat

SEQ ID NO: 1008 - DNA, 80 bp, synthetic construct
  misc_feature 1..80: note = Synthetic: DF0000010.4:START881:INDEX368:OBS1_REV
  source 1..80: mol_type = other DNA
atcccccgacctcctaattgattttttaaaatttgcatacattaaagttcactctttgtgctgtatatttctgtggtttt

SEQ ID NO: 1009 - DNA, 80 bp, synthetic construct
  misc_feature 1..80: note = Synthetic: DF0000247.4:START481:INDEX61:OBS1_REV
  source 1..80: mol_type = other DNA
cgcgtgcgcgcagccttccagaccgccagggatatgtgggagcttatcaaggccctctatggctgtctcattccccggat

SEQ ID NO: 1010 - DNA, 80 bp, synthetic construct
  misc_feature 1..80: note = Synthetic: DF0000010.4:START2401:INDEX626:OBS1_REV
  source 1..80: mol_type = other DNA
ccttattcaaatttcgccaattgtcccaataatgtcctttatagcaaattttttttctggtccaggatccaatccaggat

SEQ ID NO: 1011 - DNA, 80 bp, synthetic construct
  misc_feature 1..80: note = Synthetic: DF0000319.4:START81:INDEX866:OBS1_REV
  source 1..80: mol_type = other DNA
tccttctctccgtgggtcacgccagcctcctagtcagttctgatgagagaacctggataccttggttgccggtgaaggat

SEQ ID NO: 1012 - DNA, 80 bp, synthetic construct
  misc_feature 1..80: note = Synthetic: DF0000284.4:START481:INDEX68:OBS1_REV
  source 1..80: mol_type = other DNA
ggcttaaggcttttgctttaggagagaaggttctgggaatgtgaggtgggcttcgtgcctgtcccccagcggcagccgat

SEQ ID NO: 1013 - DNA, 80 bp, synthetic construct
  misc_feature 1..80: note = Synthetic: DF0000281.4:START2481:INDEX515:OBS1_REV
  source 1..80: mol_type = other DNA
atctctaaaagataaggactttttttaacataaccacaataccattatcacacctaacaaaattaacaataattccttaa

SEQ ID NO: 1014 - DNA, 80 bp, synthetic construct
  misc_feature 1..80: note = Synthetic: DF0000278.4:START1361:INDEX745:OBS1_REV
  source 1..80: mol_type = other DNA
atctttaaagtctaatagttttactaggatatgtctcggagttgatcgttccgggtcaattttcccaggtactcggtggg

SEQ ID NO: 1015 - DNA, 80 bp, synthetic construct
  misc_feature 1..80: note = Synthetic: DF0000318.4:START1121:INDEX676:OBS1_REV
  source 1..80: mol_type = other DNA
tctgctggagtttgctggaggtccactccagaccctgtttgcctgggtatcaccagcggaggctgcagaacagcaaagat

SEQ ID NO: 1016 - DNA, 80 bp, synthetic construct
  misc_feature 1..80: note = Synthetic: DF0000245.4:START1361:INDEX156:OBS1_REV
  source 1..80: mol_type = other DNA
attgacctatcttcaagttcgctgattctttcttctgcctgctcaaatctgctgttgagcccctctagtgaatttttcat

SEQ ID NO: 1017 - DNA, 80 bp, synthetic construct
  misc_feature 1..80: note = Synthetic: DF0000279.4:START81:INDEX724:OBS1_REV
  source 1..80: mol_type = other DNA
ctcttattatgagtgaggttgaacatcttttcatatgtttaagggccatttttatttctttttgtgaattgtctgttcat

SEQ ID NO: 1018 - DNA, 80 bp, synthetic construct
  misc_feature 1..80: note = Synthetic: DF0001333.2:START481:INDEX620:OBS1_REV
  source 1..80: mol_type = other DNA
gtaaagacattgtatggtgaataaattaaagcattcagtcataaggccaataacagagggagagagaaattaagaggcat

SEQ ID NO: 1019 - DNA, 80 bp, synthetic construct
  misc_feature 1..80: note = Synthetic: DF0001333.2:START241:INDEX179:OBS1_REV
  source 1..80: mol_type = other DNA
gccggtgctagacgagcggagggagcggggaggggagcagagagagacaaggtccgtgaggtaggctggagcaagtccat

SEQ ID NO: 1020 - DNA, 80 bp, synthetic construct
  misc_feature 1..80: note = Synthetic: DF0000277.4:START1521:INDEX913:OBS1_REV
  source 1..80: mol_type = other DNA
gcacttccttactttctggcactacaagatgctccaggctcatcttgtatatttcctgccccagtcctagaatcagccat

SEQ ID NO: 1021 - DNA, 80 bp, synthetic construct
  misc_feature 1..80: note = Synthetic: DF0000319.4:START481:INDEX896:OBS1_REV
  source 1..80: mol_type = other DNA
atgggtgccgcccttcccccgcccagggagcttagcgtgttaggcagttgcgagtcccagtgctggctgctgcccctccc

SEQ ID NO: 1022 - DNA, 80 bp, synthetic construct
  misc_feature 1..80: note = Synthetic: DF0000248.4:START2641:INDEX648:OBS1_REV
  source 1..80: mol_type = other DNA
tcttttaaagaagctgagagaagaaaggagagcaagtatatatttatagagtttgttatattaaccttcttatttaccat

SEQ ID NO: 1023 - DNA, 80 bp, synthetic construct
  misc_feature 1..80: note = Synthetic: DF0000279.4:START1441:INDEX833:OBS1_REV
  source 1..80: mol_type = other DNA
atggtatttagaaaccaagatctgggcgctaggtgtgctcattgctactggggtgtcattgcttctaggccctctcagcg

SEQ ID NO: 1024 - DNA, 80 bp, synthetic construct
  misc_feature 1..80: note = Synthetic: DF0000276.4:START881:INDEX641:OBS1_REV
  source 1..80: mol_type = other DNA
ttgcattagtgtggtacatttgttacaattgatgaaccaatattgatacattattattaactaaagtccatagtttacat

SEQ ID NO: 1025 - DNA, 80 bp, synthetic construct
  misc_feature 1..80: note = Synthetic: DF0000008.4:START1601:INDEX340:OBS1_REV
  source 1..80: mol_type = other DNA
atgtattatcctttttatatattgctggattcgatttgctaatattttgtttaggatttttgcatctatgttcatgaggg

SEQ ID NO: 1026 - DNA, 80 bp, synthetic construct
  misc_feature 1..80: note = Synthetic: DF0000359.4:START401:INDEX96:OBS1_REV
  source 1..80: mol_type = other DNA
atgtgccaggcactgttctaggcgctggggatacagcagtgaacaaaacagacaaaagtccctgccctcatggagcttac

SEQ ID NO: 1027 - DNA, 80 bp, synthetic construct
  misc_feature 1..80: note = Synthetic: DF0000283.4:START1118:INDEX590:OBS1_REV
  source 1..80: mol_type = other DNA
atgtttttatttctagcatttccttttgattcttttcttagagtttccatctctctgcttacattacccatctgttcttg

SEQ ID NO: 1028 - DNA, 80 bp, synthetic construct
  misc_feature 1..80: note = Synthetic: DF0000278.4:START2241:INDEX684:OBS1_REV
  source 1..80: mol_type = other DNA
ttttttaggtgtgtctcttgtatacagcatatagttgggtcttgcttttttatccaatttgaaaatctttttcttttaat

SEQ ID NO: 1029 - DNA, 80 bp, synthetic construct
  misc_feature 1..80: note = Synthetic: DF0000320.4:START481:INDEX154:OBS1_REV
  source 1..80: mol_type = other DNA
ttggggtggagagttctgtagatgtctattaggtccgcttggtccagagctgagttcaagtcctgaatatccttgttaat

SEQ ID NO: 1030 - DNA, 80 bp, synthetic construct
  misc_feature 1..80: note = Synthetic: DF0001198.2:START801:INDEX760:OBS1_REV
  source 1..80: mol_type = other DNA
tatataatacttctaacctctgcagttctaccccagttgcatttgaatatacattatccccatagttcaggatgggtaat

SEQ ID NO: 1031 - DNA, 80 bp, synthetic construct
  misc_feature 1..80: note = Synthetic: DF0000010.4:START2161:INDEX427:OBS1_REV
  source 1..80: mol_type = other DNA
attagattcaggttatgcatttttggcaggaataccacagaagtgatgctgtgtccttctcagtgcatcatatcaggagg

SEQ ID NO: 1032 - DNA, 80 bp, synthetic construct
  misc_feature 1..80: note = Synthetic: DF0000320.4:START2001:INDEX7:OBS1_REV
  source 1..80: mol_type = other DNA
cctctcttcctatttgaataccctttatttctttctcttgcctgattgccctggccagaacttccaatactatgttgaat

SEQ ID NO: 1033 - DNA, 80 bp, synthetic construct
  misc_feature 1..80: note = Synthetic: DF0000008.4:START2001:INDEX529:OBS1_REV
  source 1..80: mol_type = other DNA
cttcctttccaatctttatgccttttatttctttttcttgccttattgcactggctaggacctccagtacaatgttgaat

SEQ ID NO: 1034 - DNA, 80 bp, synthetic construct
  misc_feature 1..80: note = Synthetic: DF0000360.4:START387:INDEX483:OBS1_REV
  source 1..80: mol_type = other DNA
attcattcattcaacaaatatttactgagcgcctactgtgtgccaggctctgtgctaggcgctggggatacagcggtgaa

SEQ ID NO: 1035 - DNA, 80 bp, synthetic construct
  misc_feature 1..80: note = Synthetic: DF0000359.4:START321:INDEX451:OBS1_REV
  source 1..80: mol_type = other DNA
attctagtggggggagacagacaataaacaaataaataagtaaaatatatagtatgtcagatggtgataagtgctatgga

SEQ ID NO: 1036 - DNA, 80 bp, synthetic construct
  misc_feature 1..80: note = Synthetic: DF0000281.4:START1281:INDEX377:OBS1_REV
  source 1..80: mol_type = other DNA
gccttttcagtggacagagctaggaaatacgtattttttaaagagaaaatatatcatgagttcatactgatatttccaat

SEQ ID NO: 1037 - DNA, 80 bp, synthetic construct
  misc_feature 1..80: note = Synthetic: DF0000320.4:START1841:INDEX659:OBS1_REV
  source 1..80: mol_type = other DNA
attggctgtgggtttgtcataaatagctcttattattttgagatacgttccatcaatacctagtttattgagagttttta

SEQ ID NO: 1038 - DNA, 80 bp, synthetic construct
  misc_feature 1..80: note = Synthetic: DF0000279.4:START2401:INDEX331:OBS1_REV
  source 1..80: mol_type = other DNA
attggtacaatactattaactaaactacagaccttattcgaatttcaccagtttttccactaatgtccttttttctgttc

SEQ ID NO: 1039 - DNA, 80 bp, synthetic construct
  misc_feature 1..80: note = Synthetic: DF0000245.4:START81:INDEX269:OBS1_REV
  source 1..80: mol_type = other DNA
ttttcttgaataaacgctccccggattgctgcaagcctttggttaatttccagagttctgaaaaagttgattctgacaat

SEQ ID NO: 1040 - DNA, 80 bp, synthetic construct
  misc_feature 1..80: note = Synthetic: DF0000245.4:START401:INDEX394:OBS1_REV
  source 1..80: mol_type = other DNA
attgttttcgacaaatgcccccggggaaaaggcttttcgcactgggcgagctccgagtcaggtcaaataaagacaagccc

SEQ ID NO: 1041 - DNA, 80 bp, synthetic construct
  misc_feature 1..80: note = Synthetic: DF0000278.4:START801:INDEX55:OBS1_REV
  source 1..80: mol_type = other DNA
ggagtgttgtgttacagttttcttctgcttcatggttgttttttgtttttttttgggggggaattttcatcagctgaaat

SEQ ID NO: 1042 - DNA, 80 bp, synthetic construct
  misc_feature 1..80: note = Synthetic: DF0000250.4:START961:INDEX472:OBS1_REV
  source 1..80: mol_type = other DNA
atttccgctctaatctttattatttccttccttctgcttgctttgggtttagtttgctcttctttttctagtttcttaag

SEQ ID NO: 1043 - DNA, 80 bp, synthetic construct
  misc_feature 1..80: note = Synthetic: DF0000246.4:START1121:INDEX737:OBS1_REV
  source 1..80: mol_type = other DNA
atttctctgttgagattccctatttgtttattcattgtcatcatattttcctttaattctttaaacatattttcctttaa

SEQ ID NO: 1044 - DNA, 80 bp, synthetic construct
  misc_feature 1..80: note = Synthetic: DF0000320.4:START2641:INDEX73:OBS1_REV
  source 1..80: mol_type = other DNA
atttctgaggcctctgttctgttccattggtctatatatctgttttggtaccagtaccatgctgttttggttactgtagc

SEQ ID NO: 1045 - DNA, 80 bp, synthetic construct
  misc_feature 1..80: note = Synthetic: DF0000285.4:START961:INDEX376:OBS1_REV
  source 1..80: mol_type = other DNA
atttctgctctaatttttattatttcttttcttctgcttactttggatttaatttgctcttctttttctagtttcctaag

SEQ ID NO: 1046 - DNA, 80 bp, synthetic construct
  misc_feature 1..80: note = Synthetic: DF0000008.4:START961:INDEX102:OBS1_REV
  source 1..80: mol_type = other DNA
atttctgctcttatctttattatttccttccttctactttctttgggtttaatttgctcttctttttctagcttcttaag

SEQ ID NO: 1047 - DNA, 80 bp, synthetic construct
  misc_feature 1..80: note = Synthetic: DF0000285.4:START2641:INDEX793:OBS1_REV
  source 1..80: mol_type = other DNA
atttctgggctctctattctgttccattgatctatttgtctattctttcgccaataccacactgtcttgattactgtagc

SEQ ID NO: 1048 - DNA, 80 bp, synthetic construct
  misc_feature 1..80: note = Synthetic: DF0001198.2:START241:INDEX630:OBS1_REV
  source 1..80: mol_type = other DNA
atttgtaatgcccttgtatctaaattaacactgcttttggaaatcttctgtatacgattcctcaagtaatttgcaaacca

SEQ ID NO: 1049 - DNA, 80 bp, synthetic construct
  misc_feature 1..80: note = Synthetic: DF0000278.4:START481:INDEX906:OBS1_REV
  source 1..80: mol_type = other DNA
attttccccttttgcttcttttcctcttcaccacccaatttccaaagggcgcttctcccttcctttttgccttttctctc

SEQ ID NO: 1050 - DNA, 80 bp, synthetic construct
  misc_feature 1..80: note = Synthetic: DF0000282.4:START721:INDEX221:OBS1_REV
  source 1..80: mol_type = other DNA
atttttttttgatagccggacatgatgtactgggtaaaaggaactgctgtaaataggcctttagtaatgtggtggtaagg

SEQ ID NO: 1051 - DNA, 80 bp, synthetic construct
  misc_feature 1..80: note = Synthetic: DF0000250.4:START2321:INDEX290:OBS1_REV
  source 1..80: mol_type = other DNA
tttccatttatttaggtcttctttaatttctttcaacaatgttttgtagttttcagtgtacaagtcttgcacttcttttg

SEQ ID NO: 1052 - DNA, 80 bp, synthetic construct
  misc_feature 1..80: note = Synthetic: DF0000008.4:START2321:INDEX210:OBS1_REV
  source 1..80: mol_type = other DNA
tctccatttatttaggtcttctttaatttctctcagcaatgttttgtagttttcagtgtataggtcttgcacattttttg

SEQ ID NO: 1053 - DNA, 80 bp, synthetic construct
  misc_feature 1..80: note = Synthetic: DF0000285.4:START2321:INDEX292:OBS1_REV
  source 1..80: mol_type = other DNA
tctccatttatttagttcttctttgatttctttcatcagagttttgtagttttcctcatatagatcttgtacatattttg

SEQ ID NO: 1054 - DNA, 80 bp, synthetic construct
  misc_feature 1..80: note = Synthetic: DF0000280.4:START2161:INDEX71:OBS1_REV
  source 1..80: mol_type = other DNA
ccatcttttttttcttgcaatttatttgttgaagaaaccgggtcgtttgtcctgtagagtttcccacagtctggattttg

SEQ ID NO: 1055 - DNA, 80 bp, synthetic construct
  misc_feature 1..80: note = Synthetic: DF0000280.4:START2321:INDEX490:OBS1_REV
  source 1..80: mol_type = other DNA
cttaatatcatcaaatatccagtcagtgttcaaatttccccgattgtctcataaatgtttttttatagtttgtttgtttg

SEQ ID NO: 1056 - DNA, 80 bp, synthetic construct
  misc_feature 1..80: note = Synthetic: DF0001071.4:START81:INDEX825:OBS1_REV
  source 1..80: mol_type = other DNA
ggcactcggcaggctgaggcaggagaatcaggcagggaggttgcagtgagccgagatggcagcagtaccgtccagctttg

SEQ ID NO: 1057 - DNA, 80 bp, synthetic construct
  misc_feature 1..80: note = Synthetic: DF0000282.4:START961:INDEX586:OBS1_REV
  source 1..80: mol_type = other DNA
gtgtttttgatctctagcatttctttttgattctttcttagaatttccatctctctgcttacattacccatctgttcttg

SEQ ID NO: 1058 - DNA, 80 bp, synthetic construct
  misc_feature 1..80: note = Synthetic: DF0000245.4:START1761:INDEX446:OBS1_REV
  source 1..80: mol_type = other DNA
ggcctccatggtttctgatgagaaatcagctgttaatcttattgaggatcccttgtacgtgatgagtcgcttctctcttg

SEQ ID NO: 1059 - DNA, 80 bp, synthetic construct
  misc_feature 1..80: note = Synthetic: DF0000282.4:START481:INDEX83:OBS1_REV
  source 1..80: mol_type = other DNA
tcccccaggtcggttaggctctgataaaaccccagcaggttaggctctggttaaatagtttctcctgagggcaggccttg

SEQ ID NO: 1060 - DNA, 80 bp, synthetic construct
  misc_feature 1..80: note = Synthetic: DF0000320.4:START2321:INDEX449:OBS1_REV
  source 1..80: mol_type = other DNA
tttccatttgtttgtgtcctctcttatttccttgagcagtggtttgtagttctccttgaagaggtccttcacatcccttg

SEQ ID NO: 1061 - DNA, 80 bp, synthetic construct
  misc_feature 1..80: note = Synthetic: DF0000320.4:START1361:INDEX682:OBS1_REV
  source 1..80: mol_type = other DNA
gaattcggctgtgaatccgtctggtcctgggctttttttggttggtaggctattaattactgcctcaatttcagaacttg

SEQ ID NO: 1062 - DNA, 80 bp, synthetic construct
  misc_feature 1..80: note = Synthetic: DF0000279.4:START1121:INDEX683:OBS1_REV
  source 1..80: mol_type = other DNA
caatcctagtatacacataaagtagtttcagaattgctaacccatacccctgtgagaaacaaatttactaactagagtac

SEQ ID NO: 1063 - DNA, 80 bp, synthetic construct
  misc_feature 1..80: note = Synthetic: DF0000008.4:START1041:INDEX672:OBS1_REV
  source 1..80: mol_type = other DNA
caattttattgatcttttcaaagaaccagcttttggcttcgttgattttctctattgtttttttgttttctatttcattg

SEQ ID NO: 1064 - DNA, 80 bp, synthetic construct
  misc_feature 1..80: note = Synthetic: DF0000249.4:START81:INDEX387:OBS1_REV
  source 1..80: mol_type = other DNA
ttcccctggaagttgcaagccttcaatagactccagagttccaaaatagttacatcagacagattctgccagtgcaattg

SEQ ID NO: 1065 - DNA, 80 bp, synthetic construct
  misc_feature 1..80: note = Synthetic: DF0001198.2:START1:INDEX54:OBS1_REV
  source 1..80: mol_type = other DNA
tttctgggtgattggtttgctgtgaagcctgacaagaaaggagtcagcaagtcctttggctgtagatagtttgaaatgtg

SEQ ID NO: 1066 - DNA, 80 bp, synthetic construct
  misc_feature 1..80: note = Synthetic: DF0000284.4:START401:INDEX53:OBS1_REV
  source 1..80: mol_type = other DNA
cacctcctgcacgcctgcgccaccgaggagggctttctccggtctcctgccctgcccccagtctttctcgtgagcacccg

SEQ ID NO: 1067 - DNA, 80 bp, synthetic construct
  misc_feature 1..80: note = Synthetic: DF0000285.4:START1681:INDEX401:OBS1_REV
  source 1..80: mol_type = other DNA
ttgatgtgatggattacattaattgattttcgaatgttgaaccagccttgcatacctgggataaatcccacttggtcgtg

SEQ ID NO: 1068 - DNA, 80 bp, synthetic construct
  misc_feature 1..80: note = Synthetic: DF0000320.4:START1681:INDEX796:OBS1_REV
  source 1..80: mol_type = other DNA
tttatgtgatggattacgtttattgatttgcgtatgttgaaccagccttgcatcccagggatgaagccgacttgatcgtg

SEQ ID NO: 1069 - DNA, 80 bp, synthetic construct
  misc_feature 1..80: note = Synthetic: DF0000010.4:START2321:INDEX575:OBS1_REV
  source 1..80: mol_type = other DNA
cacgcgttgcatttagttgtcatgtctctttagtctcctttaatctggaacagttcctcagtctttctttgtctttcatg

SEQ ID NO: 1070 - DNA, 80 bp, synthetic construct
  misc_feature 1..80: note = Synthetic: DF0000248.4:START641:INDEX77:OBS1_REV
  source 1..80: mol_type = other DNA
gctctctgttcttatggcctgcctctccccctgggcaaaatctctgagccactgctccggagctgggggcggggacagtg

SEQ ID NO: 1071 - DNA, 80 bp, synthetic construct
  misc_feature 1..80: note = Synthetic: DF0001280.2:START81:INDEX434:OBS1_REV
  source 1..80: mol_type = other DNA
tcaatgagcgaccggggacatatggtgacaaaagatctgacaaatatattgggccgcggccattaagtgccttataagtg

SEQ ID NO: 1072 - DNA, 80 bp, synthetic construct
  misc_feature 1..80: note = Synthetic: DF0000320.4:START1761:INDEX773:OBS1_REV
  source 1..80: mol_type = other DNA
gcatgaaggggtgttgaattttatcgaaggccttttctgcatctattgagataatcatgtggtttttgtcattggttctg

SEQ ID NO: 1073 - DNA, 80 bp, synthetic construct
  misc_feature 1..80: note = Synthetic: DF0000008.4:START1761:INDEX548:OBS1_REV
  source 1..80: mol_type = other DNA
tcatgaatgggtgttgaattttgtcaaatgctttttctgcatctattgagatgatcatatgatttttctcctttattctg

SEQ ID NO: 1074 - DNA, 80 bp, synthetic construct
  misc_feature 1..80: note = Synthetic: DF0000276.4:START721:INDEX582:OBS1_REV
  source 1..80: mol_type = other DNA
cagaatagtttcactgccctaaaaatcccctgtgctccacctattcatccctccctccctccccccgaacccctggcaac

SEQ ID NO: 1075 - DNA, 80 bp, synthetic construct
  misc_feature 1..80: note = Synthetic: DF0000282.4:START161:INDEX352:OBS1_REV
  source 1..80: mol_type = other DNA
cccggcactggttcccgcggaggtttctgctcgtgggtttctgctccggtaagttgtgattctctgtatccgcctgtctg

SEQ ID NO: 1076 - DNA, 80 bp, synthetic construct
  misc_feature 1..80: note = Synthetic: DF0000278.4:START401:INDEX632:OBS1_REV
  source 1..80: mol_type = other DNA
ccccagaagctatgcttttcgaagactgcccctttaaatcgcgcgtacttttaagtcccttccctgtagtctgtgctctg

SEQ ID NO: 1077 - DNA, 80 bp, synthetic construct
  misc_feature 1..80: note = Synthetic: DF0000245.4:START801:INDEX438:OBS1_REV
  source 1..80: mol_type = other DNA
gtggtcagctaatgattggacagagatttccttaaatgcctggaaccaataagtctcccagtctttgccgaggggctctg

SEQ ID NO: 1078 - DNA, 80 bp, synthetic construct
  misc_feature 1..80: note = Synthetic: DF0000975.4:START1:INDEX348:OBS1_REV
  source 1..80: mol_type = other DNA
gtggcagagccgggattcgaacccaggtctgtctgactccaaagcccgtgctctttccactgcaccacgctgcccctctg

SEQ ID NO: 1079 - DNA, 80 bp, synthetic construct
  misc_feature 1..80: note = Synthetic: DF0000010.4:START1521:INDEX75:OBS1_REV
  source 1..80: mol_type = other DNA
ccccagccctggaatcagccatttctccaaggagccctggttccttttagtggagaatggtatttagaaaccaagatctg

SEQ ID NO: 1080 - DNA, 80 bp, synthetic construct
  misc_feature 1..80: note = Synthetic: DF0000249.4:START721:INDEX525:OBS1_REV
  source 1..80: mol_type = other DNA
gttgttgaaaactggacatttgaatctaataatgtggtaactctggaaatcagattctcccccttccccagggtttgctg

SEQ ID NO: 1081 - DNA, 80 bp, synthetic construct
  misc_feature 1..80: note = Synthetic: DF0000283.4:START161:INDEX930:OBS1_REV
  source 1..80: mol_type = other DNA
ttcgtcaaaattaccatttaagtgttcctaccagtttatgtctccagcggcttctgctccaggtaagcagatctcggctg

SEQ ID NO: 1082 - DNA, 80 bp, synthetic construct
  misc_feature 1..80: note = Synthetic: DF0001198.2:START561:INDEX662:OBS1_REV
  source 1..80: mol_type = other DNA
cagcctgctccaagacattaccagctgctgttttaatcattaatgaggcagtcagtttctgtaatctgggaggtgaacca

SEQ ID NO: 1083 - DNA, 80 bp, synthetic construct
  misc_feature 1..80: note = Synthetic: DF0001333.2:START81:INDEX396:OBS1_REV
  source 1..80: mol_type = other DNA
ggggtgatgtggtcgcacttctttgtgcgtgtgagaaggcgggcagcagcattctgcacgtgctggagtctggagagctg

SEQ ID NO: 1084 - DNA, 80 bp, synthetic construct
  misc_feature 1..80: note = Synthetic: DF0000245.4:START1121:INDEX428:OBS1_REV
  source 1..80: mol_type = other DNA
gctgatttaaagtctttgtctagtaagtccaacgtctgggcttcctcagggacagtttctattgactgctttttttcctg

SEQ ID NO: 1085 - DNA, 80 bp, synthetic construct
  misc_feature 1..80: note = Synthetic: DF0000247.4:START561:INDEX14:OBS1_REV
  source 1..80: mol_type = other DNA
gcgtctcctctgcgcgtgcgcaaggcctcacgttcagccagggatgtgtggatagcttgggccctctccggtctctcctg

SEQ ID NO: 1086 - DNA, 80 bp, synthetic construct
  misc_feature 1..80: note = Synthetic: DF0000042.4:START81:INDEX302:OBS1_REV
  source 1..80: mol_type = other DNA
caggcatgcgccaccacgcccggctaatttttgtatttttagtagagacggggtttctccatgttggtcaggctggtctc

SEQ ID NO: 1087 - DNA, 80 bp, synthetic construct
  misc_feature 1..80: note = Synthetic: DF0000285.4:START1761:INDEX633:OBS1_REV
  source 1..80: mol_type = other DNA
tcatgaatgggtgttggattttgtcaaatgctttttctgcatctattgatatgatcatgtgatttttcttctttagcctg

SEQ ID NO: 1088 - DNA, 80 bp, synthetic construct
  misc_feature 1..80: note = Synthetic: DF0000248.4:START1121:INDEX414:OBS1_REV
  source 1..80: mol_type = other DNA
gcgcagccttgggcatgcgcacagtcaccctgggatgacagtggttttagcagggctctctttgactgtctctttccctg

SEQ ID NO: 1089 - DNA, 80 bp, synthetic construct
  misc_feature 1..80: note = Synthetic: DF0000279.4:START1601:INDEX801:OBS1_REV
  source 1..80: mol_type = other DNA
caggttggctcctgtgtccttttgacatgcccccatctttttttgagcacttccttactttctggcaccacaagatgttc

SEQ ID NO: 1090 - DNA, 80 bp, synthetic construct
  misc_feature 1..80: note = Synthetic: DF0000248.4:START2721:INDEX373:OBS1_REV
  source 1..80: mol_type = other DNA
tattgttatacatattacatctatatatgttacaaacccaacaatacattgttataattattactttatataattttatg

SEQ ID NO: 1091 - DNA, 80 bp, synthetic construct
  misc_feature 1..80: note = Synthetic: DF0000248.4:START2321:INDEX359:OBS1_REV
  source 1..80: mol_type = other DNA
cataattacctttaccggtgctctttgttttttcgtgtggattcgaattaccgtctggggtcacttgctttcagcctgaa

SEQ ID NO: 1092 - DNA, 80 bp, synthetic construct
  misc_feature 1..80: note = Synthetic: DF0000278.4:START2161:INDEX409:OBS1_REV
  source 1..80: mol_type = other DNA
tggtgagtttagcccatttacatttattgttattactgatatgtttggtcttaattctgtcatattattttataattatg

SEQ ID NO: 1093 - DNA, 80 bp, synthetic construct
  misc_feature 1..80: note = Synthetic: DF0000275.4:START721:INDEX286:OBS1_REV
  source 1..80: mol_type = other DNA
catacagagtagtttcactgccctaaaaatcctctgtgctccgcctattcatccctccctcccccccaacccctggcaac

SEQ ID NO: 1094 - DNA, 80 bp, synthetic construct
  misc_feature 1..80: note = Synthetic: DF0000280.4:START1521:INDEX785:OBS1_REV
  source 1..80: mol_type = other DNA
gggagcctcttcaagttggctcctgagtccttttgacacgaccctagtagtctttgatagcttccttgctttctggtatg

SEQ ID NO: 1095 - DNA, 80 bp, synthetic construct
  misc_feature 1..80: note = Synthetic: DF0000320.4:START2961:INDEX337:OBS1_REV
  source 1..80: mol_type = other DNA
ttagatcccatttgtcaattttggcttttgttgccattgcttttggtgttttagtcatgaagtctttgcccatgcctatg

SEQ ID NO: 1096 - DNA, 80 bp, synthetic construct
  misc_feature 1..80: note = Synthetic: DF0000282.4:START2321:INDEX366:OBS1_REV
  source 1..80: mol_type = other DNA
catatagttgggtcttgttttttgatccactctgacaatctctgtcttttaattggtgtatttagaccattgacgtttaa

SEQ ID NO: 1097 - DNA, 80 bp, synthetic construct
  misc_feature 1..80: note = Synthetic: DF0000282.4:START2081:INDEX520:OBS1_REV
  source 1..80: mol_type = other DNA
catatcagttatacttctttttttttttttaactttttttagtggttgccctagagtttgcaatatacatttacaactaa

SEQ ID NO: 1098 - DNA, 80 bp, synthetic construct
  misc_feature 1..80: note = Synthetic: DF0000277.4:START1281:INDEX747:OBS1_REV
  source 1..80: mol_type = other DNA
catatctataaatatttctatatgtaaccatctgtatctatattaagctaaacatgagttcatactgatgtctccaactc

SEQ ID NO: 1099 - DNA, 80 bp, synthetic construct
  misc_feature 1..80: note = Synthetic: DF0001071.4:START881:INDEX505:OBS1_REV
  source 1..80: mol_type = other DNA
catccgatttctcaattttttccccacccttcccgcctttctattccacaaaaccgccattgtcatcatggcccatcccc

SEQ ID NO: 1100 - DNA, 80 bp, synthetic construct
  misc_feature 1..80: note = Synthetic: DF0001333.2:START161:INDEX902:OBS1_REV
  source 1..80: mol_type = other DNA
ggagggttttaaaaacaaggagggcaattttgaactggatcctgaaatgaatggggagccagtggagttgtttgaggatg

SEQ ID NO: 1101 - DNA, 80 bp, synthetic construct
  misc_feature 1..80: note = Synthetic: DF0000250.4:START1681:INDEX220:OBS1_REV
  source 1..80: mol_type = other DNA
ttaatatggtgtattacattgattgattttcgtatgttgaaccaaccttgcattcctgggataaatcccacttggtcatg

SEQ ID NO: 1102 - DNA, 80 bp, synthetic construct
  misc_feature 1..80: note = Synthetic: DF0000008.4:START1681:INDEX731:OBS1_REV
  source 1..80: mol_type = other DNA
ttaatatggtgaattacattgattgattttcgaatgttaaaccaaccttgcattcctgggataaaccccacttggtcatg

SEQ ID NO: 1103 - DNA, 80 bp, synthetic construct
  misc_feature 1..80: note = Synthetic: DF0000281.4:START1681:INDEX707:OBS1_REV
  source 1..80: mol_type = other DNA
taccagttttcagaataatgagttggtgccctagcaacctccaaaggtgaccaatgagttttttttattatgaactcatg

SEQ ID NO: 1104 - DNA, 80 bp, synthetic construct
  misc_feature 1..80: note = Synthetic: DF0000015.4:START1:INDEX278:OBS1_REV
  source 1..80: mol_type = other DNA
tgtttccaaactgctctatgaaaagaaaggttaaactctgtgagttgaacgcacacatcacaaagtagtttctgagaatg

SEQ ID NO: 1105 - DNA, 80 bp, synthetic construct
  misc_feature 1..80: note = Synthetic: DF0000029.4:START1:INDEX296:OBS1_REV
  source 1..80: mol_type = other DNA
tgtttcaaaactgctctatcaaaaggaaggttcaactctgtgagttgaatgcacacatcacaaagaagtttctgagaatg

SEQ ID NO: 1106 - DNA, 80 bp, synthetic construct
  misc_feature 1..80: note = Synthetic: DF0000319.4:START961:INDEX478:OBS1_REV
  source 1..80: mol_type = other DNA
ccaacctgatgccagtaggatcgctcctgtatagggtgtctgacaacccctgttggagggtctcacccagttgggtggca

SEQ ID NO: 1107 - DNA, 80 bp, synthetic construct
  misc_feature 1..80: note = Synthetic: DF0000319.4:START401:INDEX593:OBS1_REV
  source 1..80: mol_type = other DNA
ccaaggagctcaaacggcttagacagcaggcagccgcagccgtggtgctggtcgcccctccccccgggagctcggcaggc

SEQ ID NO: 1108 - DNA, 80 bp, synthetic construct
  misc_feature 1..80: note = Synthetic: DF0000246.4:START641:INDEX614:OBS1_REV
  source 1..80: mol_type = other DNA
ccaatgattgggcagaggttgtgctcaaacacctcgagcccgtaaggcttccaccctctgccgatggatctgtgtgtggg

SEQ ID NO: 1109 - DNA, 80 bp, synthetic construct
  misc_feature 1..80: note = Synthetic: DF0000318.4:START1281:INDEX842:OBS1_REV
  source 1..80: mol_type = other DNA
gctggtttttcctcatcttcgtggatttatctacctttggtctttgatgttggtgaccttcggatggggtttttgcgtgg

SEQ ID NO: 1110 - DNA, 80 bp, synthetic construct
  misc_feature 1..80: note = Synthetic: DF0000319.4:START1062:INDEX947:OBS1_REV
  source 1..80: mol_type = other DNA
tctggttcgctcccgcgcctggagatgtcactcaaggaggctggagaacagcaaagatgggtgcctgctccttcttctgg

SEQ ID NO: 1111 - DNA, 80 bp, synthetic construct
  misc_feature 1..80: note = Synthetic: DF0000250.4:START2561:INDEX351:OBS1_REV
  source 1..80: mol_type = other DNA
tttgtagtaagttttgaaatcgggaagtgtgagtcctccaactttgttcttctttttcaagattgttttggctattctgg

SEQ ID NO: 1112 - DNA, 80 bp, synthetic construct
  misc_feature 1..80: note = Synthetic: DF0000285.4:START2561:INDEX868:OBS1_REV
  source 1..80: mol_type = other DNA
tttatagtaagtcttgaagtcgggtagtgtcagtcctccgactttgttcttctccttcaatattgtgttggctattctgg

SEQ ID NO: 1113 - DNA, 80 bp, synthetic construct
  misc_feature 1..80: note = Synthetic: DF0000016.4:START161:INDEX523:OBS1_REV
  source 1..80: mol_type = other DNA
tcccactactgatcagcacgggagttttgacctgctccgtttccgacctgggccggttcacccctccttaggcaacctgg

SEQ ID NO: 1114 - DNA, 80 bp, synthetic construct
  misc_feature 1..80: note = Synthetic: DF0000277.4:START1201:INDEX544:OBS1_REV
  source 1..80: mol_type = other DNA
taatccattaccacatggatcattctagcctcctccccttgcttatctgtaatctcccactccaacagtgagaaacctgg

SEQ ID NO: 1115 - DNA, 80 bp, synthetic construct
  misc_feature 1..80: note = Synthetic: DF0000010.4:START401:INDEX574:OBS1_REV
  source 1..80: mol_type = other DNA
ccagtttttggctattatgaataaagctgctataaacattcgtgtacaggtttttgtgtggacatatgttttcatttctc

SEQ ID NO: 1116 - DNA, 80 bp, synthetic construct
  misc_feature 1..80: note = Synthetic: DF0000360.4:START1:INDEX859:OBS1_REV
  source 1..80: mol_type = other DNA
ccagtgtggctggagcagagtgagcaaggggagagtggtaggagatgaggccggagaggtagcggggccagatcgtgcga

SEQ ID NO: 1117 - DNA, 80 bp, synthetic construct
  misc_feature 1..80: note = Synthetic: DF0000277.4:START401:INDEX696:OBS1_REV
  source 1..80: mol_type = other DNA
ccagtttttggcgattatgaataaagctgctataaacattcgcgtgcaggtttttgtgtggacataagttttcaaatcag

SEQ ID NO: 1118 - DNA, 80 bp, synthetic construct
  misc_feature 1..80: note = Synthetic: DF0000280.4:START1681:INDEX730:OBS1_REV
  source 1..80: mol_type = other DNA
ttcaaaataatgagttggttccctagcatcctccaaaggtgaccaatgagttttttttaagtatcattatgaactcatgg

SEQ ID NO: 1119 - DNA, 80 bp, synthetic construct
  misc_feature 1..80: note = Synthetic: DF0000284.4:START1361:INDEX534:OBS1_REV
  source 1..80: mol_type = other DNA
taaattccctgtctgatagttccaacatctgtgtcatttctgagtctggttctgttgattgctttgtctcttgacaatgg

SEQ ID NO: 1120 - DNA, 80 bp, synthetic construct
  misc_feature 1..80: note = Synthetic: DF0000319.4:START641:INDEX905:OBS1_REV
  source 1..80: mol_type = other DNA
ccgcccagtgaggaaggatgggtcagggtcaggcctgaagaggcactctggccgcagtctgccacagccggtgtgttggg

SEQ ID NO: 1121 - DNA, 80 bp, synthetic construct
  misc_feature 1..80: note = Synthetic: DF0000010.4:START961:INDEX460:OBS1_REV
  source 1..80: mol_type = other DNA
cccatccccttcagtgtggttgtttcattcatttgtaatacagttagattcttttgtcacagtctgcattccatcctggg

SEQ ID NO: 1122 - DNA, 80 bp, synthetic construct
  misc_feature 1..80: note = Synthetic: DF0000282.4:START321:INDEX674:OBS1_REV
  source 1..80: mol_type = other DNA
ctccgatattcactgtgagaacctggttgagctcctggaggtaaaactcacaaaagtgtgggggcccccctatgactggg

SEQ ID NO: 1123 - DNA, 80 bp, synthetic construct
  misc_feature 1..80: note = Synthetic: DF0000280.4:START2481:INDEX482:OBS1_REV
  source 1..80: mol_type = other DNA
ccccacccacttcctccctcccggattattttgaagcaaatcccagacatcatatcatttcatccgtaaatatttcagta

SEQ ID NO: 1124 - DNA, 80 bp, synthetic construct
  misc_feature 1..80: note = Synthetic: DF0000277.4:START1041:INDEX253:OBS1_REV
  source 1..80: mol_type = other DNA
cccccgtgggaaacaactttatcaactagagtacagtgcttatgtacagttccttttgcctttagtcttacagactccac

SEQ ID NO: 1125 - DNA, 80 bp, synthetic construct
  misc_feature 1..80: note = Synthetic: DF0000318.4:START401:INDEX463:OBS1_REV
  source 1..80: mol_type = other DNA
ccccctttccaggggagtgaacggttctgtctcgctggcgttccaggcgccactggggtatgtaaaaaaaaaactcctgc

SEQ ID NO: 1126 - DNA, 80 bp, synthetic construct
  misc_feature 1..80: note = Synthetic: DF0000249.4:START241:INDEX225:OBS1_REV
  source 1..80: mol_type = other DNA
ggtcctttttgcccaccctggctcccgcaagctgtgtgcaagctgctccaggaacacgtgcacagctgcctgccacgggg

SEQ ID NO: 1127 - DNA, 80 bp, synthetic construct
  misc_feature 1..80: note = Synthetic: DF0000249.4:START321:INDEX845:OBS1_REV
  source 1..80: mol_type = other DNA
cccgcctctttgtctgcacctctgtgatcagaagcagcaatcagcgatcagagcacagatccccgatatttggaggacag

SEQ ID NO: 1128 - DNA, 80 bp, synthetic construct
  misc_feature 1..80: note = Synthetic: DF0000320.4:START2561:INDEX400:OBS1_REV
  source 1..80: mol_type = other DNA
cttgtagtatagtttgaagtcaggtagcgtgatgcctccagctttgttctttttgcttaggattgtcttggctatacggg

SEQ ID NO: 1129 - DNA, 80 bp, synthetic construct
  misc_feature 1..80: note = Synthetic: DF0001280.2:START282:INDEX607:OBS1_REV
  source 1..80: mol_type = other DNA
tattttttccttaagagttttcaaatgcggcggcgaacagatatgcttcgactttagttttaaatgccgagacagacggg

SEQ ID NO: 1130 - DNA, 80 bp, synthetic construct
  misc_feature 1..80: note = Synthetic: DF0000282.4:START1601:INDEX892:OBS1_REV
  source 1..80: mol_type = other DNA
ccctcaatttttgtttgtctgagaaagtctttatttctccttcacttttgaaggataatttcgctgggtacagaattcta

SEQ ID NO: 1131 - DNA, 80 bp, synthetic construct
  misc_feature 1..80: note = Synthetic: DF0000320.4:START1601:INDEX89:OBS1_REV
  source 1..80: mol_type = other DNA
gtggataagctttttgatgtgctgctggattcggtttgccagtattttattgaggattttcgcatcgatgttcatcaggg

SEQ ID NO: 1132 - DNA, 80 bp, synthetic construct
  misc_feature 1..80: note = Synthetic: DF0001280.2:START241:INDEX909:OBS1_REV
  source 1..80: mol_type = other DNA
tatgcttcgactttagttttaaatgccgagacagacggggcactatgaatagaaattggaagtaaattccacaatcaggg

SEQ ID NO: 1133 - DNA, 80 bp, synthetic construct
  misc_feature 1..80: note = Synthetic: DF0000250.4:START1601:INDEX782:OBS1_REV
  source 1..80: mol_type = other DNA
gtgtataatcctttttatatgttgctggattcggtttgctagtattttgttgaggatttttgcatctatattcataaggg

SEQ ID NO: 1134 - DNA, 80 bp, synthetic construct
  misc_feature 1..80: note = Synthetic: DF0000360.4:START161:INDEX519:OBS1_REV
  source 1..80: mol_type = other DNA
gggcttcccggaggaggtgacatttgagctgagacctgaaggatgagtaggagttggccaggcgaagaggtggggaaggg

SEQ ID NO: 1135 - DNA, 80 bp, synthetic construct
  misc_feature 1..80: note = Synthetic: DF0001068.4:START161:INDEX458:OBS1_REV
  source 1..80: mol_type = other DNA
ccggccaacacggcgaaaccccgtctccaccaaaaaatacgaaaaccagtcaggcgtggcggcgcgcgcctgcaatccca

SEQ ID NO: 1136 - DNA, 80 bp, synthetic construct
  misc_feature 1..80: note = Synthetic: DF0000279.4:START2481:INDEX942:OBS1_REV
  source 1..80: mol_type = other DNA
ccgtatacccttcacccagcttcccctaatgttaacatcttacataaccatagtacaattatcaaaaccaggaaattaac

SEQ ID NO: 1137 - DNA, 80 bp, synthetic construct
  misc_feature 1..80: note = Synthetic: DF0001161.2:START1:INDEX958:OBS1_REV
  source 1..80: mol_type = other DNA
cctttcagcagacgagccgctgcattctgcaccagctgaagcttccgggtggtcttcaagggcagcccccagttgagcac

SEQ ID NO: 1138 - DNA, 80 bp, synthetic construct
  misc_feature 1..80: note = Synthetic: DF0000282.4:START1041:INDEX769:OBS1_REV
  source 1..80: mol_type = other DNA
cctcaagctcagagattctttcctcagccgtgtccagtctactaatgagcccatcaaaggcattcttcatttctgttaca

SEQ ID NO: 1139 - DNA, 80 bp, synthetic construct
  misc_feature 1..80: note = Synthetic: DF0000283.4:START881:INDEX652:OBS1_REV
  source 1..80: mol_type = other DNA
tgccttgtaattttttgttgaaagccggacatgatgtatcgggtaataggaactgaggtaaataggcctttagtgtgagg

SEQ ID NO: 1140 - DNA, 80 bp, synthetic construct
  misc_feature 1..80: note = Synthetic: DF0000010.4:START1921:INDEX30:OBS1_REV
  source 1..80: mol_type = other DNA
cctcatcaaactttcacccactagttttagcatccattgatgattcttgcctgaatcaattattactatgatggttgcca

SEQ ID NO: 1141 - DNA, 80 bp, synthetic construct
  misc_feature 1..80: note = Synthetic: DF0000248.4:START1201:INDEX435:OBS1_REV
  source 1..80: mol_type = other DNA
tgtttagtgacttggctggactattttagtgaagtctatttcccccgcagtgtgaagcctctgatgtcgctcctcagagg

SEQ ID NO: 1142 - DNA, 80 bp, synthetic construct
  misc_feature 1..80: note = Synthetic: DF0000249.4:START881:INDEX288:OBS1_REV
  source 1..80: mol_type = other DNA
tcctttagttctttgagcatctttaagacagttgttttaaagtctttgtctagtagatctgccatcaggtctttttcagg

SEQ ID NO: 1143 - DNA, 80 bp, synthetic construct
  misc_feature 1..80: note = Synthetic: DF0000275.4:START81:INDEX82:OBS1_REV
  source 1..80: mol_type = other DNA
tgatgacatatgatgtggagcatcttttcatatgcttatttgccatctgtatatcttctttggtgaggtgtctgtttagg

SEQ ID NO: 1144 - DNA, 80 bp, synthetic construct
  misc_feature 1..80: note = Synthetic: DF0001161.2:START81:INDEX130:OBS1_REV
  source 1..80: mol_type = other DNA
ccttgaattgcactcggaagcaaattggtagccagtgcagactgcggagcacaggtgtaatgtgctccttgtggcttaca

SEQ ID NO: 1145 - DNA, 80 bp, synthetic construct
  misc_feature 1..80: note = Synthetic: DF0000250.4:START2961:INDEX651:OBS1_REV
  source 1..80: mol_type = other DNA
tgaagtccaatttatctattttttcttttgttgcttgtgcttttggtgtcatatctaagaaaccattgcctaatccaagg

SEQ ID NO: 1146 - DNA, 80 bp, synthetic construct
  misc_feature 1..80: note = Synthetic: DF0000008.4:START2961:INDEX874:OBS1_REV
  source 1..80: mol_type = other DNA
tgtagtccaatttatcaattttttcttttatggtttgtgctttttgtgtcctgtttaagaaatctttgcctatcccaagg

SEQ ID NO: 1147 - DNA, 80 bp, synthetic construct
  misc_feature 1..80: note = Synthetic: DF0000285.4:START2961:INDEX128:OBS1_REV
  source 1..80: mol_type = other DNA
tgaagtccagcttatcaattttttctttcatggatcgtgcctttggtgttgtatctaaaaagtcatcgccaaacccaagg

SEQ ID NO: 1148 - DNA, 80 bp, synthetic construct
  misc_feature 1..80: note = Synthetic: DF0000010.4:START2561:INDEX318:OBS1_REV
  source 1..80: mol_type = other DNA
ctgaaccatttgagagtaagttgcagacattatgcccctttacccctaaatacttcagtgtgtatttcctaagaacaagg

SEQ ID NO: 1149 - DNA, 80 bp, synthetic construct
  misc_feature 1..80: note = Synthetic: DF0000249.4:START401:INDEX155:OBS1_REV
  source 1..80: mol_type = other DNA
cctttaaatcccctggaagtcacttcagccggagggggaggggcttgcaacaatggggggaggtgcaacaacaatggccg

SEQ ID NO: 1150 - DNA, 80 bp, synthetic construct
  misc_feature 1..80: note = Synthetic: DF0001198.2:START401:INDEX869:OBS1_REV
  source 1..80: mol_type = other DNA
ctgcgggctgctgataacctggggcaaggtcggtgttctgtaatataacaccgtttcatcggcatacatatgctcaaagg

SEQ ID NO: 1151 - DNA, 80 bp, synthetic construct
  misc_feature 1..80: note = Synthetic: DF0000147.4:START1:INDEX591:OBS1_REV
  source 1..80: mol_type = other DNA
cgaactcctgggctcaagcgatcctcccgcctcagcctcccgagtagctgggactacaggcgcgtgccaccgcgcccggc

SEQ ID NO: 1152 - DNA, 80 bp, synthetic construct
  misc_feature 1..80: note = Synthetic: DF0000976.4:START1:INDEX771:OBS1_REV
  source 1..80: mol_type = other DNA
taagtggcagagccgggactcgaacccaggtcttcctgactccaagtccagtgctctttccactgcaccacactgcctcg

SEQ ID NO: 1153 - DNA, 80 bp, synthetic construct
  misc_feature 1..80: note = Synthetic: DF0000278.4:START241:INDEX862:OBS1_REV
  source 1..80: mol_type = other DNA
taggtcccttcgctagctcccctcttctttcttccctgcagtttttctcggtctgcctttgctcgccacaaagccttgcg

SEQ ID NO: 1154 - DNA, 80 bp, synthetic construct
  misc_feature 1..80: note = Synthetic: DF0000319.4:START241:INDEX485:OBS1_REV
  source 1..80: mol_type = other DNA
cgcgagtgggatcttccgatccgtgggttgcacagttccgtggaaaaagcacggtttccccggctgggtagcacgctcac

SEQ ID NO: 1155 - DNA, 80 bp, synthetic construct
  misc_feature 1..80: note = Synthetic: DF0000035.4:START161:INDEX800:OBS2_REV
  source 1..80: mol_type = other DNA
cgcgatcatagctcactgcagcctcgatctcctgggctcaagcgatcctcccgcctcagcctcccgagtagctgggacta

SEQ ID NO: 1156 - DNA, 80 bp, synthetic construct
  misc_feature 1..80: note = Synthetic: DF0000247.4:START321:INDEX161:OBS1_REV
  source 1..80: mol_type = other DNA
tggccttccccgttcgtttgccaccgagatcgctactgtttccgacaatgcccctgggcgtggggtttttccgcgctccg

SEQ ID NO: 1157 - DNA, 80 bp, synthetic construct
  misc_feature 1..80: note = Synthetic: DF0001072.4:START881:INDEX231:OBS1_REV
  source 1..80: mol_type = other DNA
cggcaaccatccgatttctcaatcttttccccacctttcccgcctttctattccacaaagccgccattgtcatcctggcc

SEQ ID NO: 1158 - DNA, 80 bp, synthetic construct
  misc_feature 1..80: note = Synthetic: DF0000248.4:START481:INDEX637:OBS1_REV
  source 1..80: mol_type = other DNA
gcctctcccggcgtggaacctccgccctacgagcgagctggggcgagggcgatcggggccccagtattctcggcctgccg

SEQ ID NO: 1159 - DNA, 80 bp, synthetic construct
  misc_feature 1..80: note = Synthetic: DF0001067.4:START81:INDEX173:OBS1_REV
  source 1..80: mol_type = other DNA
cgggaggccgaggcaggaggatcgctggagcccgaggcagggaggttgcagcgagccgagatcacggcagtgcagtccag

SEQ ID NO: 1160 - DNA, 80 bp, synthetic construct
  misc_feature 1..80: note = Synthetic: DF0000281.4:START321:INDEX743:OBS1_REV
  source 1..80: mol_type = other DNA
cgggatagattcctagaagtgggattgctgggtcaaagggtaaatgcatatgtaattttgctagatattgccaaattccc

SEQ ID NO: 1161 - DNA, 80 bp, synthetic construct
  misc_feature 1..80: note = Synthetic: DF0000319.4:START881:INDEX509:OBS1_REV
  source 1..80: mol_type = other DNA
cggggagcaggacccgtttaacgaagcactttgtcccttggtggagggggtgtgcttcgctggggggaaacccactcgtc

SEQ ID NO: 1162 - DNA, 80 bp, synthetic construct
  misc_feature 1..80: note = Synthetic: DF0001071.4:START161:INDEX755:OBS1_REV
  source 1..80: mol_type = other DNA
cggtcaacacagcgagaccccgtctccaccaaaaaaaaacgaaaaccagtcaggcgtggcggcgcgcgcctgcaatcgca

SEQ ID NO: 1163 - DNA, 80 bp, synthetic construct
  misc_feature 1..80: note = Synthetic: DF0000284.4:START1041:INDEX911:OBS1_REV
  source 1..80: mol_type = other DNA
cggtgggctgctgttaccttgtgcttagtgtgggggctggtttgccggagggtttttctcagtgttcctgctccaccctc

SEQ ID NO: 1164 - DNA, 80 bp, synthetic construct
  misc_feature 1..80: note = Synthetic: DF0000282.4:START1921:INDEX784:OBS1_REV
  source 1..80: mol_type = other DNA
tccctcccgtcccttgtatcattgctgtcattcatttcacttatacataagcatatataagcatatatatatatcacacg

SEQ ID NO: 1165 - DNA, 80 bp, synthetic construct
  misc_feature 1..80: note = Synthetic: DF0000008.4:START2561:INDEX922:OBS1_REV
  source 1..80: mol_type = other DNA
tttataataagtcttgatatctggtagtgtaagtcctccaactttgttcttctttttcaagattgttttggctattcttg

SEQ ID NO: 1166 - DNA, 80 bp, synthetic construct
  misc_feature 1..80: note = Synthetic: DF0000282.4:START2161:INDEX202:OBS1_REV
  source 1..80: mol_type = other DNA
tttttgtcttccactctttttctgccttttgtggttttaattgagcattttatatgattccattttctctcctttcttag

SEQ ID NO: 1167 - DNA, 80 bp, synthetic construct
  misc_feature 1..80: note = Synthetic: DF0001198.2:START161:INDEX864:OBS1_REV
  source 1..80: mol_type = other DNA
ctttacggagtcactacgtcgcccaatatcccttagtttttgtagggattatttatggtcgtctaaatcaaatgccttag

SEQ ID NO: 1168 - DNA, 80 bp, synthetic construct
  misc_feature 1..80: note = Synthetic: DF0000250.4:START2161:INDEX129:OBS1_REV
  source 1..80: mol_type = other DNA
tcattgctagtgtatagaaatacaattgatttttgtatattgatcttgtatcctgcaaccttgctgaactcgtttattag

SEQ ID NO: 1169 - DNA, 80 bp, synthetic construct
  misc_feature 1..80: note = Synthetic: DF0000285.4:START2161:INDEX147:OBS1_REV
  source 1..80: mol_type = other DNA
tcattgctggtatataggaaagcgattgacttttgtatattaaccttgtatcctgcaaccttgctataatcgcttattag

SEQ ID NO: 1170 - DNA, 80 bp, synthetic construct
  misc_feature 1..80: note = Synthetic: DF0000008.4:START2161:INDEX763:OBS1_REV
  source 1..80: mol_type = other DNA
ttgttgctagtatatagaaatacaattgatttttgtatattgaccttgtatcctgcgaccttgctaaattcacttattag

SEQ ID NO: 1171 - DNA, 80 bp, synthetic construct
  misc_feature 1..80: note = Synthetic: DF0000249.4:START1841:INDEX536:OBS1_REV
  source 1..80: mol_type = other DNA
ctaataattttttaaaatgtattagtctcttaaatcatgtagaaaacaaaaagtggagttacaaaccatcgttacaataa

SEQ ID NO: 1172 - DNA, 80 bp, synthetic construct
  misc_feature 1..80: note = Synthetic: DF0000279.4:START1:INDEX314:OBS1_REV
  source 1..80: mol_type = other DNA
gtcttttgcccatttttctatcgggtttttggtctttttctttctatttttaagagttctttatatattagggatattag

SEQ ID NO: 1173 - DNA, 80 bp, synthetic construct
  misc_feature 1..80: note = Synthetic: DF0000281.4:START1921:INDEX816:OBS1_REV
  source 1..80: mol_type = other DNA
tataaagttccccatcagcctttcacctaatggttttagcatccattgatgatcgttgcctagatccattatttcattag

SEQ ID NO: 1174 - DNA, 80 bp, synthetic construct
  misc_feature 1..80: note = Synthetic: DF0000277.4:START2161:INDEX58:OBS1_REV
  source 1..80: mol_type = other DNA
tggctgtgacagtttctcagactttccttgtttttgatgaccttgacagttttgaggagtactggtcaggtattttgtag

SEQ ID NO: 1175 - DNA, 80 bp, synthetic construct
  misc_feature 1..80: note = Synthetic: DF0000359.4:START1:INDEX573:OBS1_REV
  source 1..80: mol_type = other DNA
gtgtggctggagcggagtgagcgagggggagagtggtaggagatgaggtcagagaggtaacggggggccagatcatgtag

SEQ ID NO: 1176 - DNA, 80 bp, synthetic construct
  misc_feature 1..80: note = Synthetic: DF0000280.4:START1361:INDEX468:OBS1_REV
  source 1..80: mol_type = other DNA
tttagtgggaaatggtatttagagaccacaatctgggcgctaggggtgctcattgctactgggttggtcattgtttctag

SEQ ID NO: 1177 - DNA, 80 bp, synthetic construct
  misc_feature 1..80: note = Synthetic: DF0000281.4:START1361:INDEX732:OBS1_REV
  source 1..80: mol_type = other DNA
ttttagtgggaaatggtatttagagaccataatctgggcgctaggggtgctcattgctactgggttgtcattgcttctag

SEQ ID NO: 1178 - DNA, 80 bp, synthetic construct
  misc_feature 1..80: note = Synthetic: DF0000284.4:START1121:INDEX893:OBS1_REV
  source 1..80: mol_type = other DNA
tagtcaggagttgagctgggtttgggttttgttgttgctatggttaccttcagtgcaccacaggcttcaaattcctctag

SEQ ID NO: 1179 - DNA, 80 bp, synthetic construct
  misc_feature 1..80: note = Synthetic: DF0000319.4:START721:INDEX420:OBS1_REV
  source 1..80: mol_type = other DNA
ctaggggctcaggcccagggagatccgagttctgtccctgagcctctggctggagttattggagttcctgcagggaagcc

SEQ ID NO: 1180 - DNA, 80 bp, synthetic construct
  misc_feature 1..80: note = Synthetic: DF0000285.4:START1361:INDEX810:OBS1_REV
  source 1..80: mol_type = other DNA
gaattcaccagtgaacccatctgggcctggtgctttctgttttggaaggttattaattattgattcaatttctttaatag

SEQ ID NO: 1181 - DNA, 80 bp, synthetic construct
  misc_feature 1..80: note = Synthetic: DF0000320.4:START2161:INDEX852:OBS1_REV
  source 1..80: mol_type = other DNA
ctattattggtgtataggaatgcttgtgatttttgcacattgattttgtatcctgagactttgctgaagttgcttatcag

SEQ ID NO: 1182 - DNA, 80 bp, synthetic construct
  misc_feature 1..80: note = Synthetic: DF0000320.4:START1041:INDEX497:OBS1_REV
  source 1..80: mol_type = other DNA
ctattttgttaatcttttcaaaaaaccagctcctggattcattgattttttgaagggtttttcgtgtctctatctccttc

SEQ ID NO: 1183 - DNA, 80 bp, synthetic construct
  misc_feature 1..80: note = Synthetic: DF0000278.4:START1521:INDEX827:OBS1_REV
  source 1..80: mol_type = other DNA
tccttggttcacactttctttccttgagtttcttgaaaatgctgctccactgttgccttgctttgtatgttgcttttgag

SEQ ID NO: 1184 - DNA, 80 bp, synthetic construct
  misc_feature 1..80: note = Synthetic: DF0000248.4:START1681:INDEX338:OBS1_REV
  source 1..80: mol_type = other DNA
tcttcggattgcataatctctatcgatctatcttcaagttcgctgattctttcttctgccagttcaaatctactgttgag

SEQ ID NO: 1185 - DNA, 80 bp, synthetic construct
  misc_feature 1..80: note = Synthetic: DF0000974.4:START129:INDEX148:OBS1_REV
  source 1..80: mol_type = other DNA
gaatcatagaatcatagaatgtcagagctggaagggaccttagagatcatctagtccaaccccctcattttacagatgag

SEQ ID NO: 1186 - DNA, 80 bp, synthetic construct
  misc_feature 1..80: note = Synthetic: DF0000247.4:START241:INDEX195:OBS1_REV
  source 1..80: mol_type = other DNA
ctccaaatcaagtcagccccctccggcagcgaagctgctggttttcacggcctgccccgccctggtagaactaccgcgcc

SEQ ID NO: 1187 - DNA, 80 bp, synthetic construct
  misc_feature 1..80: note = Synthetic: DF0000280.4:START721:INDEX496:OBS1_REV
  source 1..80: mol_type = other DNA
ctccaccctattccctccctccccctataggtaaccatttttattaatttttggtttatccttccattgtttttttttta

SEQ ID NO: 1188 - DNA, 80 bp, synthetic construct
  misc_feature 1..80: note = Synthetic: DF0000281.4:START721:INDEX563:OBS1_REV
  source 1..80: mol_type = other DNA
ctccaccctgttccctccctccccctataggtaaccatttttattagtttttggtttatccttccattgtttctttttga

SEQ ID NO: 1189 - DNA, 80 bp, synthetic construct
  misc_feature 1..80: note = Synthetic: DF0000277.4:START1121:INDEX59:OBS1_REV
  source 1..80: mol_type = other DNA
ctcccaccatccgccatccatttacttaattgttcaattccagtatacatgtatagcggtttcagaattgttaacccgta

SEQ ID NO: 1190 - DNA, 80 bp, synthetic construct
  misc_feature 1..80: note = Synthetic: DF0000283.4:START321:INDEX925:OBS1_REV
  source 1..80: mol_type = other DNA
ctccccctgccagagccacgaggggatttttctcggatcttcaccgtgagaacctggtggggttcctggaggtaaaaccc

SEQ ID NO: 1191 - DNA, 80 bp, synthetic construct
  misc_feature 1..80: note = Synthetic: DF0001333.2:START321:INDEX265:OBS1_REV
  source 1..80: mol_type = other DNA
ctgttccagatggcaggagctgcagaggagaaggctctcgcgccaacagcggcgagattgtgtgaagggacagagaggag

SEQ ID NO: 1192 - DNA, 80 bp, synthetic construct
  misc_feature 1..80: note = Synthetic: DF0000249.4:START1201:INDEX328:OBS1_REV
  source 1..80: mol_type = other DNA
ctccttctgggactcccataatgcgtatgttggtccgcttgatggtgtcccacaggtcccttaggctctgttcacttttc

SEQ ID NO: 1193 - DNA, 80 bp, synthetic construct
  misc_feature 1..80: note = Synthetic: DF0000284.4:START721:INDEX957:OBS1_REV
  source 1..80: mol_type = other DNA
ctccttgtatctgtggttgggatgggacctgtccctctcccagcggtagcagacctctgctttgtatcggtgcaggatcc

SEQ ID NO: 1194 - DNA, 80 bp, synthetic construct
  misc_feature 1..80: note = Synthetic: DF0000248.4:START241:INDEX484:OBS1_REV
  source 1..80: mol_type = other DNA
ctcgactgggagctggggggagagggagccccgttttcttggccgcacccgcccggagtggagcttccgtcacgctgagc

SEQ ID NO: 1195 - DNA, 80 bp, synthetic construct
  misc_feature 1..80: note = Synthetic: DF0000246.4:START241:INDEX72:OBS1_REV
  source 1..80: mol_type = other DNA
tcgagtcagccccctctggcagcgaagctgctggttttcacggccagccccgccctggtagaactaccgtgccgaccgag

SEQ ID NO: 1196 - DNA, 80 bp, synthetic construct
  misc_feature 1..80: note = Synthetic: DF0000319.4:START561:INDEX587:OBS1_REV
  source 1..80: mol_type = other DNA
ctgtggggacatttcttgggaccaagccgtccagcctccctggctccagcaggggaaaagcgcggcctggagctatagag

SEQ ID NO: 1197 - DNA, 80 bp, synthetic construct
  misc_feature 1..80: note = Synthetic: DF0000285.4:START1601:INDEX846:OBS1_REV
  source 1..80: mol_type = other DNA
gtgtataattctttttatacattgttggattcgatttgctaatattttgttgaggatttttgcatctatgttcatgagag

SEQ ID NO: 1198 - DNA, 80 bp, synthetic construct
  misc_feature 1..80: note = Synthetic: DF0001071.4:START1:INDEX699:OBS1_REV
  source 1..80: mol_type = other DNA
gctcggcatcagagggagaccgtggagggaggggagagggagagggagagggagagggagagggagagggagagggagag

SEQ ID NO: 1199 - DNA, 80 bp, synthetic construct
  misc_feature 1..80: note = Synthetic: DF0001198.2:START961:INDEX164:OBS1_REV
  source 1..80: mol_type = other DNA
gaacataaatatgctggtgccaagctttgaacacatttattcaatgtagtaaaccaatgtcgctgccttcgctcggagag

SEQ ID NO: 1200 - DNA, 80 bp, synthetic construct
  misc_feature 1..80: note = Synthetic: DF0000320.4:START2481:INDEX131:OBS1_REV
  source 1..80: mol_type = other DNA
ctcttttttggttccatatgaaatttaaagtagttttttctaattctgtgaagaaagtcaatggtagcttgatggggata

SEQ ID NO: 1201 - DNA, 80 bp, synthetic construct
  misc_feature 1..80: note = Synthetic: DF0000282.4:START81:INDEX787:OBS1_REV
  source 1..80: mol_type = other DNA
tctctccaattttgggggcagcggtttgccctgtgacctcacttctctgacggatctaagaagagttgttgatttttcag

SEQ ID NO: 1202 - DNA, 80 bp, synthetic construct
  misc_feature 1..80: note = Synthetic: DF0000318.4:START481:INDEX779:OBS1_REV
  source 1..80: mol_type = other DNA
tcaagccagtggatcttagcttgctgggctccgtgggggtgggatccgctgagctagaccacttggctccctggcttcag

SEQ ID NO: 1203 - DNA, 80 bp, synthetic construct
  misc_feature 1..80: note = Synthetic: DF0000246.4:START721:INDEX592:OBS1_REV
  source 1..80: mol_type = other DNA
tcagtttttttattcttatttttattttttagcctggcttcctaggggtcgcccctgtgtctgcatagcttagtggtcag

SEQ ID NO: 1204 - DNA, 80 bp, synthetic construct
  misc_feature 1..80: note = Synthetic: DF0000284.4:START1201:INDEX464:OBS1_REV
  source 1..80: mol_type = other DNA
ctgaggtaaatagtatttatgcctggaaatgggcatgccttttcttctgctaggcctttagtgtgggggttgagtcaatc

SEQ ID NO: 1205 - DNA, 80 bp, synthetic construct
  misc_feature 1..80: note = Synthetic: DF0000245.4:START721:INDEX681:OBS1_REV
  source 1..80: mol_type = other DNA
tgtgcgtgttggggcacgccttcaacgctcagccaggcagtttacaactctgccttagccttcacttcctgcttgcgcag

SEQ ID NO: 1206 - DNA, 80 bp, synthetic construct
  misc_feature 1..80: note = Synthetic: DF0000246.4:START481:INDEX516:OBS1_REV
  source 1..80: mol_type = other DNA
ctgcgcatgcgcgcagtttcccagtcagccagggatgtgtggagagcttatctagcccttctatggctctctcatttcca

SEQ ID NO: 1207 - DNA, 80 bp, synthetic construct
  misc_feature 1..80: note = Synthetic: DF0001333.2:START1:INDEX469:OBS1_REV
  source 1..80: mol_type = other DNA
ggacttggggaggccatagagaagggagttgcaatagtcaaggcgagaggagatgaaggcttggatgaggatttcagcag

SEQ ID NO: 1208 - DNA, 80 bp, synthetic construct
  misc_feature 1..80: note = Synthetic: DF0000320.4:START801:INDEX772:OBS1_REV
  source 1..80: mol_type = other DNA
ctgctttagctgtgtcccagagattctggtacgttgtgtctttgttctcattggtttcaaagaacttttttatttctgcc

SEQ ID NO: 1209 - DNA, 80 bp, synthetic construct
  misc_feature 1..80: note = Synthetic: DF0000974.4:START1:INDEX295:OBS1_REV
  source 1..80: mol_type = other DNA
tagttagtggcagagccgggactagaacccaggtctcctgactcccagtccgtgctctctctgctcagccactctgccag

SEQ ID NO: 1210 - DNA, 80 bp, synthetic construct
  misc_feature 1..80: note = Synthetic: DF0000249.4:START161:INDEX232:OBS1_REV
  source 1..80: mol_type = other DNA
ctgggggtgggggatgggtagctgctactgtgctaagagctgaaattgaccgaaattaaccgcaatttaccgtccaagcc

SEQ ID NO: 1211 - DNA, 80 bp, synthetic construct
  misc_feature 1..80: note = Synthetic: DF0000277.4:START1361:INDEX742:OBS1_REV
  source 1..80: mol_type = other DNA
ctggggtgtcgttgcttctaggccctctcagctgacagagcaaggaaatatatgtgtgtatactaacccgtgtatataca

SEQ ID NO: 1212 - DNA, 80 bp, synthetic construct
  misc_feature 1..80: note = Synthetic: DF0000276.4:START1:INDEX689:OBS1_REV
  source 1..80: mol_type = other DNA
tcttttgcccattttttaattgggttgtttgttttcttattgttgagttttaagagttctttgtatattttggataccag

SEQ ID NO: 1213 - DNA, 80 bp, synthetic construct
  misc_feature 1..80: note = Synthetic: DF0000275.4:START1:INDEX601:OBS1_REV
  source 1..80: mol_type = other DNA
tctttggcccattttttaatcgggttgttcgttttcttattgttgagttttaagagttctttgtatattttggataacag

SEQ ID NO: 1214 - DNA, 80 bp, synthetic construct
  misc_feature 1..80: note = Synthetic: DF0000284.4:START881:INDEX188:OBS1_REV
  source 1..80: mol_type = other DNA
ctgttgctttgttactcggtgcttgttaggcttgtggtgggagtagggacgttctctgttgtcctggtccagcctcagtc

SEQ ID NO: 1215 - DNA, 80 bp, synthetic construct
  misc_feature 1..80: note = Synthetic: DF0000014.4:START1:INDEX252:OBS1_REV
  source 1..80: mol_type = other DNA
tgtttccaaactgctgaatcaaaagaaaggtttaactctgtgagatgaatgcacacatcacaaagcagtttctcagatag

SEQ ID NO: 1216 - DNA, 80 bp, synthetic construct
  misc_feature 1..80: note = Synthetic: DF0000320.4:START641:INDEX217:OBS1_REV
  source 1..80: mol_type = other DNA
cttaatcctgagttctaatttgattgcactgtggtctgagagactgtttgttatgatttccgttcttttgcatttgctga

SEQ ID NO: 1217 - DNA, 80 bp, synthetic construct
  misc_feature 1..80: note = Synthetic: DF0000282.4:START1841:INDEX32:OBS1_REV
  source 1..80: mol_type = other DNA
tatatacataagcatacataatcgaatacattgttgctattattattttgaacaaactgttatctgttagatcaattaag

SEQ ID NO: 1218 - DNA, 80 bp, synthetic construct
  misc_feature 1..80: note = Synthetic: DF0000318.4:START881:INDEX698:OBS1_REV
  source 1..80: mol_type = other DNA
cttagcagagctcgagcgctgtgctgggagatccgctgctctcttcagagccggcaggcaggaacgtttaagtctgctga

SEQ ID NO: 1219 - DNA, 80 bp, synthetic construct
  misc_feature 1..80: note = Synthetic: DF0000245.4:START1921:INDEX823:OBS1_REV
  source 1..80: mol_type = other DNA
gtagggcaggtctgctagcgacgaattctctcagtttttgtttatctgggaatgtcttaatttctccttcatttttgaag

SEQ ID NO: 1220 - DNA, 80 bp, synthetic construct
  misc_feature 1..80: note = Synthetic: DF0000285.4:START2001:INDEX504:OBS1_REV
  source 1..80: mol_type = other DNA
cttccttcccaatctgtataccttttatttccttttcttgtcttattgcattagctaggacttccagtacgatgttgaaa

SEQ ID NO: 1221 - DNA, 80 bp, synthetic construct
  misc_feature 1..80: note = Synthetic: DF0000282.4:START1521:INDEX95:OBS1_REV
  source 1..80: mol_type = other DNA
ggttggtggggtttttttctctcaacactttaaatatttcactccactctcttcttgcttgcatggtttctgaggagaag

SEQ ID NO: 1222 - DNA, 80 bp, synthetic construct
  misc_feature 1..80: note = Synthetic: DF0000250.4:START401:INDEX246:OBS1_REV
  source 1..80: mol_type = other DNA
cttctgtctagttgttctatccattattgaaagtggggtattgaagtctccaactattattgttgaattgtctatttctc

SEQ ID NO: 1223 - DNA, 80 bp, synthetic construct
  misc_feature 1..80: note = Synthetic: DF0000248.4:START81:INDEX537:OBS1_REV
  source 1..80: mol_type = other DNA
cttgaataaatgtttcttcatttgctgtatgcccttaggacaatttccagagactttaaatggttgtttttttaaaataa

SEQ ID NO: 1224 - DNA, 80 bp, synthetic construct
  misc_feature 1..80: note = Synthetic: DF0000280.4:START2001:INDEX687:OBS1_REV
  source 1..80: mol_type = other DNA
cttgatcagattcaggttcgatttttttggcaagactacttcataggtggtgttgtgttcttccatcaggaggcacataa

SEQ ID NO: 1225 - DNA, 80 bp, synthetic construct
  misc_feature 1..80: note = Synthetic: DF0000283.4:START81:INDEX90:OBS1_REV
  source 1..80: mol_type = other DNA
tgattctctgtattcgcctgtctctccagatttcggggtggcggtttgccctgcgacctcagttctctgatgggtccaag

SEQ ID NO: 1226 - DNA, 80 bp, synthetic construct
  misc_feature 1..80: note = Synthetic: DF0000246.4:START161:INDEX20:OBS1_REV
  source 1..80: mol_type = other DNA
cttggggtggaggggtgggatgggagcagccccaggcaagaatgccacagactcccactgttcttacccgaagttctagc

SEQ ID NO: 1227 - DNA, 80 bp, synthetic construct
  misc_feature 1..80: note = Synthetic: DF0000277.4:START1:INDEX713:OBS1_REV
  source 1..80: mol_type = other DNA
tcttttgcccattttttaattgggttgtttgttttcttattgttgagttttaagagttctttgtatattttggatacaag

SEQ ID NO: 1228 - DNA, 80 bp, synthetic construct
  misc_feature 1..80: note = Synthetic: DF0000359.4:START241:INDEX908:OBS1_REV
  source 1..80: mol_type = other DNA
gaaaaataaagcagggtaagggggatagggagtgttgggggtgagggtgtgctattttaaatagggtggtcagggaaggc

SEQ ID NO: 1229 - DNA, 80 bp, synthetic construct
  misc_feature 1..80: note = Synthetic: DF0000318.4:START1:INDEX60:OBS1_REV
  source 1..80: mol_type = other DNA
gaaatcacccgccttctgcgttgatctcgctgggagctgcagaccggagctgttcctattcggccatcttgccagccacc

SEQ ID NO: 1230 - DNA, 80 bp, synthetic construct
  misc_feature 1..80: note = Synthetic: DF0000276.4:START1012:INDEX145:OBS1_REV
  source 1..80: mol_type = other DNA
tttttaaaaaattaatagactttattttttagagcagttttaggtttacagaaaaattgagcagaaagtacagagagttc

SEQ ID NO: 1231 - DNA, 80 bp, synthetic construct
  misc_feature 1..80: note = Synthetic: DF0000280.4:START2401:INDEX819:OBS1_REV
  source 1..80: mol_type = other DNA
tgtatctctaaaagataaggactctttttaaaaacataaccacaataccattatcacacctaaaaaattaacaataattc

SEQ ID NO: 1232 - DNA, 80 bp, synthetic construct
  misc_feature 1..80: note = Synthetic: DF0000282.4:START1441:INDEX876:OBS1_REV
  source 1..80: mol_type = other DNA
tctgatgtaattcttatctttgctcctctataggtaaggtgttttttccctctggcttctttcaagattttttctttgtc

SEQ ID NO: 1233 - DNA, 80 bp, synthetic construct
  misc_feature 1..80: note = Synthetic: DF0000360.4:START241:INDEX456:OBS1_REV
  source 1..80: mol_type = other DNA
gacaattataacccagagtggcagggtaggactgggggggcccagaggagggcgcctgacccggcctggggggtcaggga

SEQ ID NO: 1234 - DNA, 80 bp, synthetic construct
  misc_feature 1..80: note = Synthetic: DF0000279.4:START1361:INDEX733:OBS1_REV
  source 1..80: mol_type = other DNA
gacagagctaggaaatatatgtatgtatactaacccatgcatacacatacatctatatcttatttctgtatctatctatc

SEQ ID NO: 1235 - DNA, 80 bp, synthetic construct
  misc_feature 1..80: note = Synthetic: DF0000250.4:START2401:INDEX404:OBS1_REV
  source 1..80: mol_type = other DNA
gcgttgaatctgtagatcaatttggggagtattgccatcttaacaatattaagtcttccaatccatgaacatgggatgtc

SEQ ID NO: 1236 - DNA, 80 bp, synthetic construct
  misc_feature 1..80: note = Synthetic: DF0000054.4:START81:INDEX542:OBS1_REV
  source 1..80: mol_type = other DNA
tacaggcgcccgccactacgcccggctattttttgtagttttagtagagacggggtttcaccgttttagccgggatggtc

SEQ ID NO: 1237 - DNA, 80 bp, synthetic construct
  misc_feature 1..80: note = Synthetic: DF0000037.4:START81:INDEX470:OBS1_REV
  source 1..80: mol_type = other DNA
tacaggcacgcgccaccacgcccagctaatttttgtatttttagtagagacggggtttcaccatgttggccaggatggtc

SEQ ID NO: 1238 - DNA, 80 bp, synthetic construct
  misc_feature 1..80: note = Synthetic: DF0000247.4:START161:INDEX550:OBS1_REV
  source 1..80: mol_type = other DNA
gacggagctggggtgggggatgggagcagccccaggctaaaacgccacagactcccactgttcttacccgaggttcagta

SEQ ID NO: 1239 - DNA, 80 bp, synthetic construct
  misc_feature 1..80: note = Synthetic: DF0000282.4:START1:INDEX891:OBS1_REV
  source 1..80: mol_type = other DNA
tttgttcagctttttacttgttgttaggacggagtggcgacttccaagctccttacatgccggaccggaaaccggaagtc

SEQ ID NO: 1240 - DNA, 80 bp, synthetic construct
  misc_feature 1..80: note = Synthetic: DF0000008.4:START401:INDEX753:OBS1_REV
  source 1..80: mol_type = other DNA
tttttgtctacttgttctatcaattactgagagaggtgtgttaaaatctcctactataattgtggatttgtctatttctc

SEQ ID NO: 1241 - DNA, 80 bp, synthetic construct
  misc_feature 1..80: note = Synthetic: DF0000285.4:START401:INDEX244:OBS1_REV
  source 1..80: mol_type = other DNA
tttctgcctgctggatctgtctatttctgatagaggggtgttgaagtctccaactataatagtggattcgtctatttctc

SEQ ID NO: 1242 - DNA, 80 bp, synthetic construct
  misc_feature 1..80: note = Synthetic: DF0000320.4:START401:INDEX609:OBS1_REV
  source 1..80: mol_type = other DNA
tttctgtctcgttgatctgtctaatattgacagtggggtgttaaagtctcccactattattgtgtgggagtctaagtctc

SEQ ID NO: 1243 - DNA, 80 bp, synthetic construct
  misc_feature 1..80: note = Synthetic: DF0000319.4:START1041:INDEX882:OBS1_REV
  source 1..80: mol_type = other DNA
gagatgtcactcaaggaggctggagaacagcaaagatgggtgcctgctccttcttctgggacctctgacctcgaggggca

SEQ ID NO: 1244 - DNA, 80 bp, synthetic construct
  misc_feature 1..80: note = Synthetic: DF0001198.2:START1201:INDEX768:OBS1_REV
  source 1..80: mol_type = other DNA
gagcagtcacaatttcggttctttttacactgacaaggcttcttaaggtaagggattaaaagtttcttaaaaccagacaa

SEQ ID NO: 1245 - DNA, 80 bp, synthetic construct
  misc_feature 1..80: note = Synthetic: DF0000283.4:START481:INDEX712:OBS1_REV
  source 1..80: mol_type = other DNA
ttctccccttaggtgagacaggaaggctagagggggctggagttgggtaatttcccttcccctaagctgggataaggctc

SEQ ID NO: 1246 - DNA, 80 bp, synthetic construct
  misc_feature 1..80: note = Synthetic: DF0000318.4:START641:INDEX205:OBS1_REV
  source 1..80: mol_type = other DNA
gctgcggtgggctccgcccagttcgaacttcccggcggctttgtttacactgtgaggggaaaaccgcctactcaagcctc

SEQ ID NO: 1247 - DNA, 80 bp, synthetic construct
  misc_feature 1..80: note = Synthetic: DF0000281.4:START2321:INDEX323:OBS1_REV
  source 1..80: mol_type = other DNA
ggatccaaacaaggtccacacattgcatttggttgttatgtctcttaagtctcttttaatctataggttctccttccctc

SEQ ID NO: 1248 - DNA, 80 bp, synthetic construct
  misc_feature 1..80: note = Synthetic: DF0000246.4:START2241:INDEX22:OBS1_REV
  source 1..80: mol_type = other DNA
tgttgattttttagctatattttttgagttattttcttagtggttgctctagggattacaatatgcatctttaacttatc

SEQ ID NO: 1249 - DNA, 80 bp, synthetic construct
  misc_feature 1..80: note = Synthetic: DF0000360.4:START321:INDEX378:OBS1_REV
  source 1..80: mol_type = other DNA
gatacagcggtgaacaagacagactcggtccctgccctcacggagctcacagtctagtgggggagacagacatgtaatca

SEQ ID NO: 1250 - DNA, 80 bp, synthetic construct
  misc_feature 1..80: note = Synthetic: DF0000008.4:START2401:INDEX339:OBS1_REV
  source 1..80: mol_type = other DNA
gcattgaatctatagatcaatttggggagaattgacatctttacaatattgagtcttccaatccatgaacatggtatatc

SEQ ID NO: 1251 - DNA, 80 bp, synthetic construct
  misc_feature 1..80: note = Synthetic: DF0000249.4:START1521:INDEX841:OBS1_REV
  source 1..80: mol_type = other DNA
tttttctttcagcactttgaatatatcatcccactgccttctggccttcaaggtttctgttgagaaatccgctgataatc

SEQ ID NO: 1252 - DNA, 80 bp, synthetic construct
  misc_feature 1..80: note = Synthetic: DF0000318.4:START1361:INDEX759:OBS1_REV
  source 1..80: mol_type = other DNA
ttgttcccttgctggcgaggagttgtgatcctttggaggagaagaggcgttctggtttttggaattttcagcctttttgc

SEQ ID NO: 1253 - DNA, 80 bp, synthetic construct
  misc_feature 1..80: note = Synthetic: DF0000285.4:START3121:INDEX284:OBS1_REV
  source 1..80: mol_type = other DNA
ttgtttgttttcttattgttgagttttaagagttctttgtatattttggataacagtcctttatcagatatgtcttttgc

SEQ ID NO: 1254 - DNA, 80 bp, synthetic construct
  misc_feature 1..80: note = Synthetic: DF0000250.4:START3121:INDEX927:OBS1_REV
  source 1..80: mol_type = other DNA
ttatttgtctttttattgttgagttgtaagagttctttatatattctggatactagtcccttatcagatatatgatttgc

SEQ ID NO: 1255 - DNA, 80 bp, synthetic construct
  misc_feature 1..80: note = Synthetic: DF0000008.4:START3121:INDEX748:OBS1_REV
  source 1..80: mol_type = other DNA
ttgtttgtcttttttttattgatttgtaggagttctttatatattctggatacgagtcctttgtcagatatatgttttgc

SEQ ID NO: 1256 - DNA, 80 bp, synthetic construct
  misc_feature 1..80: note = Synthetic: DF0000320.4:START3121:INDEX666:OBS1_REV
  source 1..80: mol_type = other DNA
ttgtttgtttttttcttgtaaatttgtttaagttccttgtagattctggatattagccctttgtcagatggatagattgc

SEQ ID NO: 1257 - DNA, 80 bp, synthetic construct
  misc_feature 1..80: note = Synthetic: DF0000976.4:START161:INDEX422:OBS1_REV
  source 1..80: mol_type = other DNA
gcactttacagtttacaaagcgctttcacatacattatctcatttgatcctcacaacaaccctgtgaggtaggcagggca

SEQ ID NO: 1258 - DNA, 80 bp, synthetic construct
  misc_feature 1..80: note = Synthetic: DF0000318.4:START161:INDEX522:OBS1_REV
  source 1..80: mol_type = other DNA
tccctcacggcttcccttggctaggggagggagttccccgaccccttgcgcttcccgggtgaggcgacgccccaccctgc

SEQ ID NO: 1259 - DNA, 80 bp, synthetic construct
  misc_feature 1..80: note = Synthetic: DF0000249.4:START481:INDEX562:OBS1_REV
  source 1..80: mol_type = other DNA
tgcttttgaatgtcctagtctttaatgtctggctcccaaaaggggaaaaaagaaaaatgaaggggagaaagggcgccggc

SEQ ID NO: 1260 - DNA, 80 bp, synthetic construct
  misc_feature 1..80: note = Synthetic: DF0000320.4:START81:INDEX181:OBS1_REV
  source 1..80: mol_type = other DNA
gcctatgtgtgtctttgcacgtgagatgggtctcctgaatacagcacaccgatgggtcttgactctttatccaatttgcc

SEQ ID NO: 1261 - DNA, 80 bp, synthetic construct
  misc_feature 1..80: note = Synthetic: DF0000281.4:START2081:INDEX647:OBS1_REV
  source 1..80: mol_type = other DNA
ttagattcaggttcgatttttttggcaagaatacttcataggtggtgctgtgtacttcctattgcatcacatcaggaggc

SEQ ID NO: 1262 - DNA, 80 bp, synthetic construct
  misc_feature 1..80: note = Synthetic: DF0000249.4:START1761:INDEX268:OBS1_REV
  source 1..80: mol_type = other DNA
tactagcttttatatttgcccatgtatttacctttactgagatctttatttcttcatacggcttcgtgttactgtctagc

SEQ ID NO: 1263 - DNA, 80 bp, synthetic construct
  misc_feature 1..80: note = Synthetic: DF0000318.4:START1601:INDEX781:OBS1_REV
  source 1..80: mol_type = other DNA
gctattgatacttgtgtatgcttcacgaagttctcgtgctgtgtttttcagctccatcaggtcatttatgttcttctcta

SEQ ID NO: 1264 - DNA, 80 bp, synthetic construct
  misc_feature 1..80: note = Synthetic: DF0000284.4:START561:INDEX888:OBS1_REV
  source 1..80: mol_type = other DNA
gctcctacctcttccctagaagctatagtgtctttgccttggccctgggggcgatagggtttgctgcccctctccccagc

SEQ ID NO: 1265 - DNA, 80 bp, synthetic construct
  misc_feature 1..80: note = Synthetic: DF0000318.4:START721:INDEX233:OBS1_REV
  source 1..80: mol_type = other DNA
gctgctgcctttctttcagagatgccctgcccagagaggaggaatctagagaggcagtctggctacagcggctttgccga

SEQ ID NO: 1266 - DNA, 80 bp, synthetic construct
  misc_feature 1..80: note = Synthetic: DF0000247.4:START2081:INDEX578:OBS1_REV
  source 1..80: mol_type = other DNA
gctttatgcaatcttatgtcttttaaagaagttaagagaagaaatgagaaaaaatatatttatatagtcttttatattta

SEQ ID NO: 1267 - DNA, 80 bp, synthetic construct
  misc_feature 1..80: note = Synthetic: DF0000010.4:START1041:INDEX961:OBS1_REV
  source 1..80: mol_type = other DNA
tgtttgtttacagttctttttgtctttagccttacagtttccactcatttccaaagttacttaggtcagctcctttttcc

SEQ ID NO: 1268 - DNA, 80 bp, synthetic construct
  misc_feature 1..80: note = Synthetic: DF0000282.4:START2001:INDEX767:OBS1_REV
  source 1..80: mol_type = other DNA
tccaagtccactttcaaataacactataccgcttcacgggtagtgcgagtaccttataataacaaaatattcctaattcc

SEQ ID NO: 1269 - DNA, 80 bp, synthetic construct
  misc_feature 1..80: note = Synthetic: DF0000248.4:START321:INDEX389:OBS1_REV
  source 1..80: mol_type = other DNA
ggaatttagcctctgcaacacggagctgggggggatgagaaatgctggcggcctgcccctcccggggagataccgtagcc

SEQ ID NO: 1270 - DNA, 80 bp, synthetic construct
  misc_feature 1..80: note = Synthetic: DF0000318.4:START961:INDEX538:OBS1_REV
  source 1..80: mol_type = other DNA
gtctgtcgacccctgctgggaggtgtctcccagtcaggaggcacgggggtcagggacccacttgaggaggcagtctgtcc

SEQ ID NO: 1271 - DNA, 80 bp, synthetic construct
  misc_feature 1..80: note = Synthetic: DF0001072.4:START161:INDEX419:OBS1_REV
  source 1..80: mol_type = other DNA
ggagaccggcccggccaacacagcgaaaccccgtctccaccaaaaccagtcaggcgtggcggcgcgtgcctgcaatcgca

SEQ ID NO: 1272 - DNA, 80 bp, synthetic construct
  misc_feature 1..80: note = Synthetic: DF0000245.4:START321:INDEX399:OBS1_REV
  source 1..80: mol_type = other DNA
tgcgagtggggtcttccagggaaccgccagacaggtcaaataatgacaattctctgggaatggggctttggaggagctcc

SEQ ID NO: 1273 - DNA, 80 bp, synthetic construct
  misc_feature 1..80: note = Synthetic: DF0000041.4:START1:INDEX924:OBS1_REV
  source 1..80: mol_type = other DNA
ttgaactcctgacctcgtgatccacccgcctcggcctcccaaagtgctgggattacaggcgtgagccaccgcgcccggcc

SEQ ID NO: 1274 - DNA, 80 bp, synthetic construct
  misc_feature 1..80: note = Synthetic: DF0000010.4:START1441:INDEX923:OBS1_REV
  source 1..80: mol_type = other DNA
ggcgctaggtgtgctcattgctactggggtgtcattgcttctaggccctctcagcggacagagctaggaaatatatgtac

SEQ ID NO: 1275 - DNA, 80 bp, synthetic construct
  misc_feature 1..80: note = Synthetic: DF0000064.4:START1:INDEX260:OBS1_REV
  source 1..80: mol_type = other DNA
tcgatctcctgaccttgtgatccgcccgcctcggcctcccaaagtgctgggattacaggcgtgagccaccgcgcccagcc

SEQ ID NO: 1276 - DNA, 80 bp, synthetic construct
  misc_feature 1..80: note = Synthetic: DF0000283.4:START401:INDEX854:OBS1_REV
  source 1..80: mol_type = other DNA
tggtaaagttttttcccctgtagggcaggtctttgttatggagaacgctctgggcgtatttcataatggttacttttccc

SEQ ID NO: 1277 - DNA, 80 bp, synthetic construct
  misc_feature 1..80: note = Synthetic: DF0000010.4:START161:INDEX719:OBS1_REV
  source 1..80: mol_type = other DNA
ggtattgtcagtttttttgattttagccattctaataggtgtgtagtggtatctcattgtggttttaatttgcatttccc

SEQ ID NO: 1278 - DNA, 80 bp, synthetic construct
  misc_feature 1..80: note = Synthetic: DF0000277.4:START161:INDEX821:OBS1_REV
  source 1..80: mol_type = other DNA
ggtattgtcagttttttggattttagccattctaataggtgtgtagtggtatctcattgttgttttaatttgcaattccc

SEQ ID NO: 1279 - DNA, 80 bp, synthetic construct
  misc_feature 1..80: note = Synthetic: DF0000280.4:START801:INDEX878:OBS1_REV
  source 1..80: mol_type = other DNA
tgtaaaatatttacatggttccaaagtcaaatctacaaaacaaggtatattcaaagaagtctagcttctatccctgtccc

SEQ ID NO: 1280 - DNA, 80 bp, synthetic construct
  misc_feature 1..80: note = Synthetic: DF0000281.4:START801:INDEX411:OBS1_REV
  source 1..80: mol_type = other DNA
tgtaaaacatttacatggttccaaagtcaaaactataaaacaaggtacattcagagaagtcttgcttccatccctgtccc

SEQ ID NO: 1281 - DNA, 80 bp, synthetic construct
  misc_feature 1..80: note = Synthetic: DF0000248.4:START2561:INDEX281:OBS1_REV
  source 1..80: mol_type = other DNA
ttctggttctcttcatttgttcctgtggattcgagttaccatctggtgtcatttccttactccaatacagctttgctccc

SEQ ID NO: 1282 - DNA, 80 bp, synthetic construct
  misc_feature 1..80: note = Synthetic: DF0000280.4:START1201:INDEX803:OBS1_REV
  source 1..80: mol_type = other DNA
tcaaattcaggactacagggtttttacttaacctcatcgatcttacatctgtatctcctttctcccacgccgaaaatccc

SEQ ID NO: 1283 - DNA, 80 bp, synthetic construct
  misc_feature 1..80: note = Synthetic: DF0000016.4:START81:INDEX294:OBS1_REV
  source 1..80: mol_type = other DNA
tggtcccccgctcccgggaggtcaccatattgatgccgaacttagtgcggacacccgatcggcatagcgcactacagccc

SEQ ID NO: 1284 - DNA, 80 bp, synthetic construct
  misc_feature 1..80: note = Synthetic: DF0000319.4:START801:INDEX790:OBS1_REV
  source 1..80: mol_type = other DNA
tgggctgcccggattcctcagaactaccaggaggaaaggctaagtctgctggtccgcagagactgcggccacccctcccc

SEQ ID NO: 1285 - DNA, 80 bp, synthetic construct
  misc_feature 1..80: note = Synthetic: DF0000319.4:START1:INDEX834:OBS1_REV
  source 1..80: mol_type = other DNA
tcacacgcttattatggttcttttcgatgggagcctccgatcgccgctgcttctagtcggccatcttggccccgcccccc

SEQ ID NO: 1286 - DNA, 80 bp, synthetic construct
  misc_feature 1..80: note = Synthetic: DF0000246.4:START2001:INDEX167:OBS1_REV
  source 1..80: mol_type = other DNA
ttaaacaatcttatgtcttttaaagaaattaagagaagaaaagagaaaaaatatatttatacagtcttttatatttaccc

SEQ ID NO: 1287 - DNA, 80 bp, synthetic construct
  misc_feature 1..80: note = Synthetic: DF0000245.4:START1:INDEX814:OBS1_REV
  source 1..80: mol_type = other DNA
ttttgccagtgttctcgttgcttttatggaggagtggattttcggaggtccttactccgccattttcgctgacgtcaccc

SEQ ID NO: 1288 - DNA, 80 bp, synthetic construct
  misc_feature 1..80: note = Synthetic: DF0000281.4:START2698:INDEX624:OBS1_REV
  source 1..80: mol_type = other DNA
tttttttttaactttttattatggaaattttcaaacatacacaaaagtagagagaatagtataatgaacccccatgtacc

SEQ ID NO: 1289 - DNA, 80 bp, synthetic construct
  misc_feature 1..80: note = Synthetic: DF0001198.2:START1281:INDEX127:OBS1_REV
  source 1..80: mol_type = other DNA
tacaattttactccagcatacttcagtaccgcacaaacaatataacgcaggacactcagtctaaaatagcagacaacacc

SEQ ID NO: 1290 - DNA, 80 bp, synthetic construct
  misc_feature 1..80: note = Synthetic: DF0000281.4:START1121:INDEX64:OBS1_REV
  source 1..80: mol_type = other DNA
ggttcctaacgacattaacataattacttatttgctttatcctacaatatacatataatagtttcaaaataacaatacca

SEQ ID NO: 1291 - DNA, 80 bp, synthetic construct
  misc_feature 1..80: note = Synthetic: DF0000280.4:START1121:INDEX381:OBS1_REV
  source 1..80: mol_type = other DNA
ggttctcaacgacaccaacataattactcatttgctttatcccacaatacacacacaacagtctcagaataacaatacca

SEQ ID NO: 1292 - DNA, 80 bp, synthetic construct
  misc_feature 1..80: note = Synthetic: DF0000278.4:START1601:INDEX44:OBS1_REV
  source 1..80: mol_type = other DNA
gtattccctgagttcttgcatgtttaaaactgtttttctatagccttgatacttgaaggacagcttggctggatataaaa

SEQ ID NO: 1293 - DNA, 80 bp, synthetic construct
  misc_feature 1..80: note = Synthetic: DF0000278.4:START2401:INDEX113:OBS1_REV
  source 1..80: mol_type = other DNA
gtttcctttatcattataaaatgtccttctttgtctcttttaatgctttttgtcttgaattctactttgtctgatattaa

SEQ ID NO: 1294 - DNA, 80 bp, synthetic construct
  misc_feature 1..80: note = Synthetic: DF0000282.4:START241:INDEX74:OBS1_REV
  source 1..80: mol_type = other DNA
tccccctggagtttttaactctcagacttgtccacactgagcctccagcaattcgtcaattacagttcaggttttcctac

SEQ ID NO: 1295 - DNA, 80 bp, synthetic construct
  misc_feature 1..80: note = Synthetic: DF0000278.4:START1:INDEX454:OBS1_REV
  source 1..80: mol_type = other DNA
gtatcgtttttggaggaaatattgggagacgggtatctaggcggccgccattgtcttcagctacccggaagtcccctcta

SEQ ID NO: 1296 - DNA, 80 bp, synthetic construct
  misc_feature 1..80: note = Synthetic: DF0000245.4:START2241:INDEX543:OBS1_REV
  source 1..80: mol_type = other DNA
ttaatttcaatagtatacaaaaactttgctcctatatagctccgttccctcccccctcctttgtgctgttattgtcatac

SEQ ID NO: 1297 - DNA, 80 bp, synthetic construct
  misc_feature 1..80: note = Synthetic: DF0000249.4:START1441:INDEX715:OBS1_REV
  source 1..80: mol_type = other DNA
ttattgaggatcccttgtatgtgacgagtcgcttttctcttgctgctttcaagattctctctttgtctttgactttcgac

SEQ ID NO: 1298 - DNA, 80 bp, synthetic construct
  misc_feature 1..80: note = Synthetic: DF0000279.4:START2001:INDEX447:OBS1_REV
  source 1..80: mol_type = other DNA
gtctgccgggtttctccactgtaaagttactatttttccctttgtaattaataaatatcttgggggagatactttgagac

SEQ ID NO: 1299 - DNA, 80 bp, synthetic construct
  misc_feature 1..80: note = Synthetic: DF0000285.4:START161:INDEX426:OBS1_REV
  source 1..80: mol_type = other DNA
gtctgaaattaatatagctactcctgctttcttttgattagtgttagcatggtatatctttctccatccttttactttta

SEQ ID NO: 1300 - DNA, 80 bp, synthetic construct
  misc_feature 1..80: note = Synthetic: DF0000250.4:START161:INDEX728:OBS1_REV
  source 1..80: mol_type = other DNA
gtctgatattagtatagccactccagctctcttttggttactgtttgcatggtatatctttttccatccttttactttca

SEQ ID NO: 1301 - DNA, 80 bp, synthetic construct
  misc_feature 1..80: note = Synthetic: DF0000279.4:START2161:INDEX502:OBS1_REV
  source 1..80: mol_type = other DNA
gtctgatgttttctcatgattagattgaggttatgcatttttggcaagaataccacagaagtgatgttgtgcccttctca

SEQ ID NO: 1302 - DNA, 80 bp, synthetic construct
  misc_feature 1..80: note = Synthetic: DF0000284.4:START321:INDEX638:OBS1_REV
  source 1..80: mol_type = other DNA
gtggaggcccgtggaaaagagcttgcgagtgagtgcgaactccccttgtgtctggggctcccagttttctaaactgtcac

SEQ ID NO: 1303 - DNA, 80 bp, synthetic construct
  misc_feature 1..80: note = Synthetic: DF0000281.4:START1521:INDEX628:OBS1_REV
  source 1..80: mol_type = other DNA
tgggagccccttcaagttggctcctgtgtccttttgacacgaccccattagtctttgatagcttccttgctttctggcac

SEQ ID NO: 1304 - DNA, 80 bp, synthetic construct
  misc_feature 1..80: note = Synthetic: DF0000250.4:START881:INDEX599:OBS1_REV
  source 1..80: mol_type = other DNA
gtggaaggttaggttattgatttgagatctttcttcttttttaatataggcatttacagctataaatttccctctaagca

SEQ ID NO: 1305 - DNA, 80 bp, synthetic construct
  misc_feature 1..80: note = Synthetic: DF0000282.4:START1201:INDEX837:OBS1_REV
  source 1..80: mol_type = other DNA
tttcttctgttcctttctctctttcttctccttctggtattcccattacgcgtatgttacaccttttgtagttgtcccac

SEQ ID NO: 1306 - DNA, 80 bp, synthetic construct
  misc_feature 1..80: note = Synthetic: DF0000278.4:START1201:INDEX786:OBS1_REV
  source 1..80: mol_type = other DNA
gttccattgttttgtttttcttcttcagggactccaattatacgtatgttattccttctttgcctgtcttccatttctac

SEQ ID NO: 1307 - DNA, 80 bp, synthetic construct
  misc_feature 1..80: note = Synthetic: DF0000285.4:START1841:INDEX612:OBS1_REV
  source 1..80: mol_type = other DNA
gttagctgtaggttttttgtagatgttctttatcaagttgaggaagttcccctctattcctagtttgctgagagttttta

SEQ ID NO: 1308 - DNA, 80 bp, synthetic construct
  misc_feature 1..80: note = Synthetic: DF0000250.4:START1841:INDEX271:OBS1_REV
  source 1..80: mol_type = other DNA
gttagctgtgggtttttcgtagatgccctttatcaggttgaggaagttcccttctattcctagtttgttgagtgttttta

SEQ ID NO: 1309 - DNA, 80 bp, synthetic construct
  misc_feature 1..80: note = Synthetic: DF0000282.4:START641:INDEX319:OBS1_REV
  source 1..80: mol_type = other DNA
tgtggggggaggggaagcgttctatagtcctatgattaggtctcagtcttttagtgagcctgtgcctctggactgtgaac

SEQ ID NO: 1310 - DNA, 80 bp, synthetic construct
  misc_feature 1..80: note = Synthetic: DF0000282.4:START1281:INDEX792:OBS1_REV
  source 1..80: mol_type = other DNA
gttctctgagcttcctggatctgtggtttggtgtctgtcattaattttggggaaattctcagtcattattgcttcaaata

SEQ ID NO: 1311 - DNA, 80 bp, synthetic construct
  misc_feature 1..80: note = Synthetic: DF0000245.4:START2321:INDEX910:OBS1_REV
  source 1..80: mol_type = other DNA
tagttattttcttagtggttgccctggggattacaattaacatcttaatttataacaatctagttcgaattaataccaac

SEQ ID NO: 1312 - DNA, 80 bp, synthetic construct
  misc_feature 1..80: note = Synthetic: DF0000284.4:START1281:INDEX691:OBS1_REV
  source 1..80: mol_type = other DNA
gttgttttttctttctttttttgtgtgtctcgtaattttttattgaatgccggacattttgtgtagaagaacagtagaga

SEQ ID NO: 1313 - DNA, 80 bp, synthetic construct
  misc_feature 1..80: note = Synthetic: DF0000248.4:START721:INDEX879:OBS1_REV
  source 1..80: mol_type = other DNA
gttttcgagagcgcccttaggcttgaacttccccacactctgtttcaaataaagtcagttcctttggggagagcttcgga

SEQ ID NO: 1314 - DNA, 80 bp, synthetic construct
  misc_feature 1..80: note = Synthetic: DF0000284.4:START641:INDEX380:OBS1_REV
  source 1..80: mol_type = other DNA
tgggcccaagattgtttcctgcccttccccaggggcagatggcttttgcttctactcttcccccagaatcagatggtttt

SEQ ID NO: 1315 - DNA, 80 bp, synthetic construct
  misc_feature 1..80: note = Synthetic: DF0000277.4:START2321:INDEX307:OBS1_REV
  source 1..80: mol_type = other DNA
tttgtcacaattaatgaaccaatattgatacattattattaactaaagtccatactttattcagatttccttagttttta

SEQ ID NO: 1316 - DNA, 80 bp, synthetic construct
  misc_feature 1..80: note = Synthetic: DF0000248.4:START1841:INDEX636:OBS1_REV
  source 1..80: mol_type = other DNA
tgggaagttttcagccattatttcttcgaatattttttctgctcctttctctctctcctctccttctggtactcccatta

SEQ ID NO: 1317 - DNA, 80 bp, synthetic construct
  misc_feature 1..80: note = Synthetic: DF0000277.4:START881:INDEX744:OBS1_REV
  source 1..80: mol_type = other DNA
tagatttttttgtcacattctgcattccatcctgggatcccccgacctcctaaatgattttttaaaatttgcatacatta

SEQ ID NO: 1318 - DNA, 80 bp, synthetic construct
  misc_feature 1..80: note = Synthetic: DF0000248.4:START2401:INDEX770:OBS1_REV
  source 1..80: mol_type = other DNA
ttgttttatacaattgctttttaaatcagttaagagaagaaaggagaagaaatatgcatttatactgtcttttataatta

SEQ ID NO: 1319 - DNA, 80 bp, synthetic construct
  misc_feature 1..80: note = Synthetic: DF0000282.4:START801:INDEX597:OBS1_REV
  source 1..80: mol_type = other DNA
tccctgccatatctgagtctggttctgatgcttgctctgtctcttcaaactgtgttttttgccttttagtatgccttgta

SEQ ID NO: 1320 - DNA, 80 bp, synthetic construct
  misc_feature 1..80: note = Synthetic: DF0000285.4:START1441:INDEX933:OBS1_REV
  source 1..80: mol_type = other DNA
ttaggaagtattccctctgcttctatcttctggaagagattgtagagaattggtataatttcttccttaaatgtttggta

SEQ ID NO: 1321 - DNA, 80 bp, synthetic construct
  misc_feature 1..80: note = Synthetic: DF0000320.4:START1441:INDEX604:OBS1_REV
  source 1..80: mol_type = other DNA
ttagggaggagtccctctttttctattgtttggaatagtttcagaaggaatggtaccagctcctctttgtacctctggta

SEQ ID NO: 1322 - DNA, 80 bp, synthetic construct
  misc_feature 1..80: note = Synthetic: DF0000278.4:START1921:INDEX243:OBS1_REV
  source 1..80: mol_type = other DNA
tactatctggtttgtcagtttttaatggtatcctttgactcccacctattgcctatacgacaatcaatgagcttattcta

SEQ ID NO: 1323 - DNA, 80 bp, synthetic construct
  misc_feature 1..80: note = Synthetic: DF0000279.4:START1841:INDEX818:OBS1_REV
  source 1..80: mol_type = other DNA
tactgtggtgtttgcctaatggtgattttctatttccttcattccttctacatttattaattggaattcttctgtaagga

SEQ ID NO: 1324 - DNA, 80 bp, synthetic construct
  misc_feature 1..80: note = Synthetic: DF0000283.4:START641:INDEX285:OBS1_REV
  source 1..80: mol_type = other DNA
tctttcagctgtaatccactgttattatactggagccctgttgatgtggtggtaaggtgtgggggaggggaagcgttcta

SEQ ID NO: 1325 - DNA, 80 bp, synthetic construct
  misc_feature 1..80: note = Synthetic: DF0000250.4:START1761:INDEX639:OBS1_REV
  source 1..80: mol_type = other DNA
tcatgaaagggtgttggattttgtcaaatgctttttctgcgtctattgagatgatcatgtggtttttgtcctttattcta

SEQ ID NO: 1326 - DNA, 80 bp, synthetic construct
  misc_feature 1..80: note = Synthetic: DF0000245.4:START1281:INDEX526:OBS1_REV
  source 1..80: mol_type = other DNA
ttcagttattgtacttttcaactccagaatttctatttggttcttttttataatttctatctctttattgatattctcta

SEQ ID NO: 1327 - DNA, 80 bp, synthetic construct
  misc_feature 1..80: note = Synthetic: DF0000277.4:START1441:INDEX706:OBS1_REV
  source 1..80: mol_type = other DNA
ttctccaaggagccctggttccttttattggagaatggtattagaaaccaagatctgggcgctaggtgtgctcgttgcta

SEQ ID NO: 1328 - DNA, 80 bp, synthetic construct
  misc_feature 1..80: note = Synthetic: DF0000276.4:START801:INDEX757:OBS1_REV
  source 1..80: mol_type = other DNA
tagggttcactctttgtgttgtacattctatgggttttgacaaatgtataatgtcatgtatccaccattacagtatcata

SEQ ID NO: 1329 - DNA, 80 bp, synthetic construct
  misc_feature 1..80: note = Synthetic: DF0000249.4:START2241:INDEX313:OBS1_REV
  source 1..80: mol_type = other DNA
tatagcttttttgtccctcatttccttctttactgtcttcctttgtgtttagttgatttttttgtagtgatacgttttga

SEQ ID NO: 1330 - DNA, 80 bp, synthetic construct
  misc_feature 1..80: note = Synthetic: DF0000275.4:START1001:INDEX898:OBS1_REV
  source 1..80: mol_type = other DNA
tttttaaatagactttattttttagagcagttttaggttcacagcaaaattgagcggaaggtacagagatttcccatata

SEQ ID NO: 1331 - DNA, 80 bp, synthetic construct
  misc_feature 1..80: note = Synthetic: DF0000281.4:START2401:INDEX416:OBS1_REV
  source 1..80: mol_type = other DNA
tatcatctaatacccagtccgtgttcaaatttccccgattgtctcaaaaatgtctttttacagttggtttgttcgaatca

SEQ ID NO: 1332 - DNA, 80 bp, synthetic construct
  misc_feature 1..80: note = Synthetic: DF0000281.4:START81:INDEX197:OBS1_REV
  source 1..80: mol_type = other DNA
ttattatgagtgaggttgagcatcttttcatatgtttaagggccatttgcatttctttttctgtgaactgtctgttcata

SEQ ID NO: 1333 - DNA, 80 bp, synthetic construct
  misc_feature 1..80: note = Synthetic: DF0000277.4:START2453:INDEX122:OBS1_REV
  source 1..80: mol_type = other DNA
ttttttaaaataaactttttattttagaatagttttagatttacagaaaaattgcgaagatagtacagagagttcccata

SEQ ID NO: 1334 - DNA, 80 bp, synthetic construct
  misc_feature 1..80: note = Synthetic: DF0000245.4:START1201:INDEX347:OBS1_REV
  source 1..80: mol_type = other DNA
tttggtgagacatcgttctcatactttcctttagttctttagacatggtttcctttagttctttgaacatatttaaaata

SEQ ID NO: 1335 - DNA, 80 bp, synthetic construct
  misc_feature 1..80: note = Synthetic: DF0000277.4:START1601:INDEX761:OBS1_REV
  source 1..80: mol_type = other DNA
tccagctttggccattgggagctctttcagttggctcctgtgtccctttgacatacccccatcattgtgggtttttttga

SEQ ID NO: 1336 - DNA, 80 bp, synthetic construct
  misc_feature 1..80: note = Synthetic: DF0000250.4:START2881:INDEX920:OBS1_REV
  source 1..80: mol_type = other DNA
tcacgaagatttactcctatgttttcttctaagagttttatagttttagctcttacatttaggtctttgatccattttga

SEQ ID NO: 1337 - DNA, 80 bp, synthetic construct
  misc_feature 1..80: note = Synthetic: DF0000285.4:START2881:INDEX722:OBS1_REV
  source 1..80: mol_type = other DNA
tcatctagattttctcctatgttatcttctaggagttttatagttttgcgttttacatttaggtctatgatccattttga

SEQ ID NO: 1338 - DNA, 80 bp, synthetic construct
  misc_feature 1..80: note = Synthetic: DF0000320.4:START2881:INDEX813:OBS1_REV
  source 1..80: mol_type = other DNA
tcctgaatggtattgcctaggttttcttctagggtttttatggttttaggtcttacgtttaagtctttaatccatcttga

SEQ ID NO: 1339 - DNA, 80 bp, synthetic construct
  misc_feature 1..80: note = Synthetic: DF0000245.4:START1521:INDEX832:OBS1_REV
  source 1..80: mol_type = other DNA
ttcttcaaatattctttctgcccctttctctctctcctctccttctgggactcccattatgcgtatgttggtacgcttga

SEQ ID NO: 1340 - DNA, 80 bp, synthetic construct
  misc_feature 1..80: note = Synthetic: DF0000250.4:START641:INDEX739:OBS1_REV
  source 1..80: mol_type = other DNA
tctgttattgatttctaatttcattccattgtggtcggagaacatactttgtatgatttcaatccttttaaatttattga

SEQ ID NO: 1341 - DNA, 80 bp, synthetic construct
  misc_feature 1..80: note = Synthetic: DF0000008.4:START641:INDEX642:OBS1_REV
  source 1..80: mol_type = other DNA
tttgttattgatttctaatttaattccattgtggtcagagaacatactctgtatgatttcaatccttttaaatttattga

SEQ ID NO: 1342 - DNA, 80 bp, synthetic construct
  misc_feature 1..80: note = Synthetic: DF0000008.4:START2881:INDEX445:OBS1_REV
  source 1..80: mol_type = other DNA
tcacgaagatattctcctatgttttcttctagaagttttatagttttatcttttacatttaggtctatgatccatcttga

SEQ ID NO: 1343 - DNA, 80 bp, synthetic construct
  misc_feature 1..80: note = Synthetic: DF0000245.4:START2561:INDEX581:OBS1_REV
  source 1..80: mol_type = other DNA
tcatgttttttaatccattctgccaatctctgccttttgattggagtgtttaatccatttacatttaatgtaattactga

SEQ ID NO: 1344 - DNA, 80 bp, synthetic construct
  misc_feature 1..80: note = Synthetic: DF0000279.4:START881:INDEX42:OBS1_REV
  source 1..80: mol_type = other DNA
tccattttgggttccccccacatcctggttgattttaattatttatttttgaggtatgtgaaacattatcatggttctaa

SEQ ID NO: 1345 - DNA, 80 bp, synthetic construct
  misc_feature 1..80: note = Synthetic: DF0000284.4:START161:INDEX344:OBS1_REV
  source 1..80: mol_type = other DNA
tcctcccgtgctctgccaaaggtgaaacagttcgtgtgtcccgtctctccttggaggggcttgtctctctttggaattca

SEQ ID NO: 1346 - DNA, 80 bp, synthetic construct
  misc_feature 1..80: note = Synthetic: DF0000010.4:START801:INDEX136:OBS1_REV
  source 1..80: mol_type = other DNA
ttacaagttctatgggttttgacaaatgcatagtgtcgtgtatccaccaccacagtatcatacagattattttatacaga

SEQ ID NO: 1347 - DNA, 80 bp, synthetic construct
  misc_feature 1..80: note = Synthetic: DF0000278.4:START561:INDEX701:OBS1_REV
  source 1..80: mol_type = other DNA
tctttgtttgttttggtggtggatggaggagttgtgtgtcctccgattttgtggttctcttttgtcttgcaggaccctaa

SEQ ID NO: 1348 - DNA, 80 bp, synthetic construct
  misc_feature 1..80: note = Synthetic: DF0000281.4:START1:INDEX183:OBS1_REV
  source 1..80: mol_type = other DNA
tcttttgcccatttttctattgggttgttggtctttttcttctcaatttttagaagctctttatatattagggatattaa

SEQ ID NO: 1349 - DNA, 80 bp, synthetic construct
  misc_feature 1..80: note = Synthetic: DF0001161.2:START161:INDEX926:OBS1_REV
  source 1..80: mol_type = other DNA
tgacggtgcatagggagagaggcgatctctaaggtaaccagggcccaaaccatatagggctttatagattaaagtcaaca

SEQ ID NO: 1350 - DNA, 80 bp, synthetic construct
  misc_feature 1..80: note = Synthetic: DF0000245.4:START1441:INDEX873:OBS1_REV
  source 1..80: mol_type = other DNA
tggtgtcccacaggtctcttaggctctgttcatttttcttcattcttttttctttctgttcctcagactggataatctca

SEQ ID NO: 1351 - DNA, 80 bp, synthetic construct
  misc_feature 1..80: note = Synthetic: DF0000280.4:START1921:INDEX326:OBS1_REV
  source 1..80: mol_type = other DNA
tgtctggttgtctctctttttgtgatgttagcagccattgatgatcattgcctagatccattatttcattaggggttgca

SEQ ID NO: 1352 - DNA, 80 bp, synthetic construct
  misc_feature 1..80: note = Synthetic: DF0000318.4:START81:INDEX678:OBS1_REV
  source 1..80: mol_type = other DNA
ttcggctcgccctccgtgggctgcacccactgtctaaccagtcccaatgagatgagccgggtacctcagttggaaatgca

SEQ ID NO: 1353 - DNA, 80 bp, synthetic construct
  misc_feature 1..80: note = Synthetic: DF0000278.4:START1681:INDEX140:OBS1_REV
  source 1..80: mol_type = other DNA
tgccgaagtttccccagtcatctcttggttggatgaagctcatcctctagtagattcctcaggaagggctcgtgggtaca

SEQ ID NO: 1354 - DNA, 80 bp, synthetic construct
  misc_feature 1..80: note = Synthetic: DF0000277.4:START2401:INDEX835:OBS1_REV
  source 1..80: mol_type = other DNA
tgcgaagatagtacagagagttcccatataccccacacccagtttcccctattattaacatcttacattagtatggtaca

SEQ ID NO: 1355 - DNA, 80 bp, synthetic construct
  misc_feature 1..80: note = Synthetic: DF0000277.4:START1841:INDEX627:OBS1_REV
  source 1..80: mol_type = other DNA
tggaaggaagtcactatgcgcagcccacacttaaggagtggggagttatgctccacctccttgagggcggagtatctaca

SEQ ID NO: 1356 - DNA, 80 bp, synthetic construct
  misc_feature 1..80: note = Synthetic: DF0001250.2:START1:INDEX204:OBS1_REV
  source 1..80: mol_type = other DNA
tgggaaccgtcagcaggagcgccccggctgatctcaattgccacgatggcgcatagggagagaggcgatctctaaggtaa

SEQ ID NO: 1357 - DNA, 80 bp, synthetic construct
  misc_feature 1..80: note = Synthetic: DF0000010.4:START1121:INDEX487:OBS1_REV
  source 1..80: mol_type = other DNA
tgtataatatgtacagaaagtagtttcagaattgctaacccatacctctgcgaaaaacaaacctactaactagagttcaa

SEQ ID NO: 1358 - DNA, 80 bp, synthetic construct
  misc_feature 1..80: note = Synthetic: DF0000320.4:START881:INDEX766:OBS1_REV
  source 1..80: mol_type = other DNA
ttgtgatgttagggtgtcgattttagatctttcccgctttctcttgtgggcatttagtgctataaatttccctctaaaca

SEQ ID NO: 1359 - DNA, 80 bp, synthetic construct
  misc_feature 1..80: note = Synthetic: DF0000249.4:START641:INDEX31:OBS1_REV
  source 1..80: mol_type = other DNA
tgtttttgttatttttttgttttgtttttattgttgtaggctgtctctgtgccgaggatcagcctgaggtgtaaacttaa

SEQ ID NO: 1360 - DNA, 80 bp, synthetic construct
  misc_feature 1..80: note = Synthetic: DF0000249.4:START2161:INDEX675:OBS1_REV
  source 1..80: mol_type = other DNA
ttcctttctcatttccttttgtgtatattctatagttattttctttgtggttaccatggggattacatttaacatcctaa

SEQ ID NO: 1361 - DNA, 80 bp, synthetic construct
  misc_feature 1..80: note = Synthetic: DF0000010.4:START1201:INDEX124:OBS1_REV
  source 1..80: mol_type = other DNA
tttgtaactcccttctccgacagtgagaaacctggctcccattatcctcaatatatttacttatttgctcaatcctagaa

SEQ ID NO: 1362 - DNA, 80 bp, synthetic construct
  misc_feature 1..80: note = Synthetic: DF0000248.4:START881:INDEX39:OBS1_REV
  source 1..80: mol_type = other DNA
ttgaggccagtctttgaggtttgttctgaccccaggagggctcttcttagctgtctctttccctggttctctctggtaaa

SEQ ID NO: 1363 - DNA, 80 bp, synthetic construct
  misc_feature 1..80: note = Synthetic: DF0001250.2:START293:INDEX250:OBS1_REV
  source 1..80: mol_type = other DNA
tttatttatttatttattcgatttataaaattgcgcccttcgtgataaaatcgcctcagggcgcaagtacaaaatttaaa

SEQ ID NO: 1364 - DNA, 80 bp, synthetic construct
  misc_feature 1..80: note = Synthetic: DF0000246.4:START321:INDEX618:OBS1_REV
  source 1..80: mol_type = other DNA
tttccccgttcgtttcctaccgagttcgccacttttactgacaacgccgctgggcgtgggttttcgccctccgctccaaa